(19) United States
(12) Patent Application Publication
(10) Pub. No.: US 2024/0251810 A1
(43) Pub. Date: Aug. 1, 2024

(54) INCREASED YIELD OF MILK PROTEIN PER ACRE

(71) Applicant: Nobell Foods, Inc., South San Francisco, CA (US)

(72) Inventors: Magi EL-RICHANI, San Francisco, CA (US); Viviane LANQUAR, San Carlos, CA (US); Joseph KLEMASZEWSKI, Eden Prairie, MN (US); Yaxin WANG, South San Francisco, CA (US); Sunchung PARK, South San Francisco, CA (US); Alexander CAIN, South San Francisco, CA (US); Leyla HATHWAIK, South San Francisco, CA (US); Jacob William HOYLE, South San Francisco, CA (US)

(21) Appl. No.: 18/598,187

(22) Filed: Mar. 7, 2024

Related U.S. Application Data
(63) Continuation of application No. PCT/US2022/077440, filed on Sep. 30, 2022.
(60) Provisional application No. 63/325,564, filed on Mar. 30, 2022.
(60) Provisional application No. 63/250,600, filed on Sep. 30, 2021.

(51) Int. Cl. A23C 11/06; A23C 20/00; C07K 14/415; C07K 14/47

(52) U.S. Cl. CPC A23C 11/06; A23C 20/005; C07K 14/415; C07K 14/4732; A23C 2240/15

(57) ABSTRACT

The present disclosure provides a solution to meet the world's growing milk and milk protein needs, while also balancing resource utilization, providing minimal impacts upon environmental systems, and moving away from an inhumane disregard for animal welfare.

### CROSS REFERENCE TO RELATED APPLICATIONS

[0001] The present application is a continuation of International Application No. PCT/US2022/077440, filed Sep. 30, 2022, which claims priority to U.S. Provisional Patent Application No. 63/325,564, filed Mar. 30, 2022, and U.S. Provisional Patent Application No. 63/250,600, filed Sep. 30, 2021, each of which is incorporated by reference herein in their entirety for all purposes.

### REFERENCE TO AN ELECTRONIC SEQUENCE LISTING

[0002] The contents of the electronic sequence listing (ALRO_011_04US_SeqList_ST26.xml; Size: 1,602,807 bytes; and Date of Creation: Mar. 6, 2024) is herein incorporated by reference in its entirety.

### FIELD OF THE DISCLOSURE

[0003] The present disclosure generally relates to genetically modified plants with increased expression of mammalian milk proteins and agronomic practices for producing same. The disclosure further relates to edible compositions comprising novel ratios of mammalian proteins to plant-based proteins. Methods of modulating fatty acid profiles, and modified products produced therefrom are also disclosed.

### BACKGROUND OF THE DISCLOSURE

[0004] Globally, more than 7.5 billion people around the world consume milk and other dairy products. It is estimated that cow milk accounts for 83% of global milk production and the demand for milk and dairy products is expected to keep increasing, in a commensurate manner with the growth in human population, which is expected to exceed 9 billion people by 2050.

[0005] Relying on the inhumane and environmentally detrimental practice of animal agriculture to meet the growing demand for milk and dairy products is not sustainable. According to the Food & Agriculture Organization of the United Nations, animal agriculture is responsible for 18% of all greenhouse gases, which is more than the entire transportation sector combined. Dairy cows alone account for 3% of this total.

[0006] Accordingly, in order to meet the world's growing milk and milk protein needs—while also balancing resource utilization, providing minimal impacts upon environmental systems, and moving away from an inhumane disregard for animal welfare—a better approach to producing milk proteins is urgently needed.

### BRIEF SUMMARY OF THE DISCLOSURE

[0007] The disclosure provides a solution that allows for safe, sustainable, and humane production of milk proteins. The disclosure provided herein teaches plants, compositions, and methods, which enable increased production of recombinant proteins (e.g., milk proteins).

[0008] In aspects, the disclosure provides a method for increasing yield of recombinant milk protein production per acre in a plant, comprising: providing to a locus a plurality of transgenic plant seed, wherein the transgenic plant seed comprise a recombinant DNA construct encoding a fusion protein comprising at least one milk protein, and wherein the plurality of transgenic plant seed produce in the aggregate at least 2 pounds of recombinant milk protein per acre. In aspects, the plurality of transgenic plant seed produce in the aggregate at least 5, 10, 20, 30, 40, 50, 60, 70, 80, 90, 100, 150, 200, 250, 300, 350, or 400 pounds of recombinant milk protein per acre

[0009] In aspects, the disclosure provides a method for increasing yield of recombinant milk protein production per acre in a plant, comprising: providing to a locus a plurality of genetically modified plant seed, wherein the plurality of genetically modified plant seed produce in the aggregate at least 2 pounds of recombinant milk protein per acre. In aspects, the plurality of genetically modified plant seed produce in the aggregate at least 5, 10, 20, 30, 40, 50, 60, 70, 80, 90, 100, 150, 200, 250, 300, 350, or 400 pounds of recombinant milk protein per acre

[0010] In aspects, the plant seed comprises at least one of the following genetic modifications: a recombinant DNA construct encoding a fusion protein comprising at least one milk protein; a recombinant DNA construct encoding a protein capable of forming a protein body; a recombinant DNA construct encoding a prolamin; a first recombinant DNA construct encoding a milk protein and a second recombinant DNA construct encoding a prolamin; a recombinant DNA construct encoding a milk protein that has been modified to have an amino acid sequence different from the native animal expressed milk protein; a recombinant DNA construct encoding a milk protein that has been modified to promote addition of a post-translational modification; a recombinant DNA construct encoding a milk protein that has been modified to prevent addition of a post-translational modification; a recombinant DNA construct encoding an enzyme that alters post-translational modification of protein; a recombinant DNA construct encoding an enzyme capable of modifying a protein; a recombinant DNA construct encoding a kinase; and/or a genetic modification that modulates the expression of a plant protease. The plant may have any one, or all, of the aforementioned modifications. The plant may be a monocot or dicot. The plant may be a soybean plant.

[0011] Provided herein are recombinant fusion proteins comprising (i) a first milk protein, and (ii) a second milk protein. At least one of the first milk protein and the second milk protein may be, for example, α-S1 casein, α-S2 casein, β-casein, κ-casein, para-κ-casein, β-lactoglobulin, α-lactalbumin, lysozyme, lactoferrin, lactoperoxidase, serum albumin, or an immunoglobulin. In some embodiments, at least one of the first milk protein and the second milk protein is β-lactoglobulin. In some embodiments, at least one of the first milk protein and the second milk protein is α-S1 casein, α-S2 casein, β-casein, κ-casein, or para-κ-casein. In some embodiments, i) the first milk protein is α-S1 casein, α-S2 casein, β-casein, κ-casein, or para-κ-casein; and ii) the second milk protein is α-S1 casein, α-S2 casein, β-casein, κ-casein, or para-κ-casein. In some embodiments, at least one of the first milk protein and the second milk protein is κ-casein and comprises the sequence of SEQ ID NO: 4, or a sequence at least 90% identical thereto. In some embodiments, at least one of the first milk protein and the second milk protein is para-κ-casein and comprises the sequence of SEQ ID NO: 2, or a sequence at least 90% identical thereto. In some embodiments, at least one of the first milk protein and the second milk protein is β-casein and comprises the sequence of SEQ ID NO: 6, or a sequence at least 90% identical thereto. In some embodiments, at least one of the first milk protein and the second milk protein is α-S1 casein and comprises the sequence SEQ ID NO: 8, or a sequence at least 90% identical thereto. In some embodiments, at least one of the first milk protein and the second milk protein is α-S2 casein and comprises the sequence SEQ ID NO: 84, or a sequence at least 90% identical thereto. In some embodiments, the first milk protein and the second milk protein are different proteins. In some embodiments, the first milk protein and the second milk protein are the same proteins. In some embodiments, the fusion protein is plant-expressed. In some embodiments, the fusion protein is expressed in soybean plant. In some embodiments, the fusion protein comprises a protease cleavage site. In some embodiments, the protease cleavage site is a chymosin cleavage site.

[0012] Also provided herein are nucleic acids encoding one or more of the recombinant fusion proteins of the disclosure, and expression vectors comprising the same. In some embodiments, the nucleic acids are codon-optimized for expression in a plant, such as a soybean.

[0013] Additionally, provided herein are host cells comprising a nucleic acid or an expression vector of the disclosure, i.e., a nucleic acid or expression vector encoding a fusion protein. The host cells may be, for example, plant cells, bacterial cells, fungal cells, or mammalian cells. In some embodiments, the host cells are soybean cells.

[0014] Also provided herein are plants stably transformed with a nucleic acid or an expression vector of the disclosure. In some embodiments, the fusion protein is expressed in the plant in an amount of 1% or higher per total protein weight of soluble protein extractable from the plant.

[0015] Also provided herein are methods for making a fusion protein, the methods comprising: (a) transforming a host cell with a nucleic acid or an expression vector described herein; and (b) growing the transformed host cell under conditions wherein the fusion protein is expressed. In some embodiments, the method comprises co-expressing in the host cell a protein capable of forming a protein body, such as a prolamin selected from a gliadin, a hordein, a secalin, a zein, a kafirin, or an avenin. In some embodiments, the method comprises expressing a kinase in the host cell. In some embodiments, expression of one or more proteases is knocked down or knocked out in the cell.

[0016] Also provided herein are transgenic plants comprising a recombinant fusion protein, or a nucleic acid or expression vector comprising the same. In some embodiments, the transgenic plant is a soybean plant. In some embodiments, the fusion protein is expressed in the plant in an amount of 1% or higher per total protein weight of soluble protein extractable from the plant.

[0017] Also provided herein are methods for stably expressing a recombinant fusion protein in a plant, the methods comprising: (i) transforming a plant with a plant transformation vector comprising an expression cassette comprising a nucleic acid molecule encoding the fusion protein; and (ii) growing the transformed plant under conditions wherein the recombinant fusion protein is expressed. In some embodiments, the fusion protein is expressed in an amount of 1% or higher per total protein weight of soluble protein extractable from the plant.

[0018] Also provided herein are seed processing compositions comprising a fusion protein of the disclosure.

[0019] Also provided herein are food compositions comprising a fusion protein of the disclosure. In some embodiments, the food composition is selected from the group consisting of cheese and processed cheese products, yogurt and fermented dairy products, directly acidified counterparts of fermented dairy products, cottage cheese dressing, frozen dairy products, frozen desserts, desserts, baked goods, toppings, icings, fillings, low-fat spreads, dairy-based dry mixes, soups, sauces, salad dressing, geriatric nutrition, creams and creamers, analog dairy products, follow-up formula, baby formula, infant formula, milk, dairy beverages, acid dairy drinks, smoothies, milk tea, butter, margarine, butter alternatives, growing up milks, low-lactose products and beverages, medical and clinical nutrition products, protein/nutrition bar applications, sports beverages, confections, meat products, analog meat products, meal replacement beverages, weight management food and beverages, cultured buttermilk, sour cream, yogurt, skyr, leben, lassi, kefir, powder containing a milk protein, and low-lactose products. In some embodiments, the food composition comprises a total amount of casein protein; wherein about 32% to 100% by weight of the total amount of casein protein in the food composition is beta-casein. In some embodiments, the food composition is a cheese composition. In some embodiments, the cheese composition has the ability to stretch to at least 3 cm in length without breaking, as determined by heating a 100-gram mass of the composition at a temperature of 225° C. for 4 minutes and cooling to about 90° C. and pulling with a fork placed beneath the mass.

[0020] Also provided herein is method of making a food composition, comprising combining a fusion protein disclosed herein into a food composition.

[0021] Also provided herein is an alternative dairy food composition comprising i) a recombinant fusion protein described herein; and ii) at least one lipid. In some embodiments, the recombinant fusion protein confers on the alternative dairy food composition one or more characteristics of a dairy food product selected from the group consisting of: taste, aroma, appearance, handling, mouthfeel, density, structure, texture, elasticity, springiness, coagulation, binding, leavening, aeration, foaming, creaminess, and emulsification. In some embodiments, the alternative dairy food composition does not comprise any other milk proteins. In some embodiments, the alternative dairy food composition comprises calcium at a concentration of about 0.01 to about 2% by weight. In some embodiments, the alternative dairy food composition comprises a total amount of casein protein; wherein about 32% to 100% by weight of the total amount of casein protein in the food composition is beta-casein. In some embodiments, the alternative diary food composition has a pH of about 5.2 to about 5.9. In some embodiments, the alternative dairy food composition is selected from the group consisting of cheese and processed cheese products, yogurt and fermented dairy products, directly acidified counterparts of fermented dairy products, cottage cheese dressing, frozen dairy products, frozen desserts, desserts, baked goods, toppings, icings, fillings, low-fat spreads, dairy-based dry mixes, soups, sauces, salad dressing, geriatric nutrition, creams and creamers, analog dairy products, follow-up formula, baby formula, infant formula, milk, dairy beverages, acid dairy drinks, smoothies, milk tea, butter, margarine, butter alternatives, growing up milks, low-lactose products and beverages, medical and clinical nutrition products, protein/nutrition bar applications, sports beverages, confections, meat products, analog meat products, meal replacement beverages, weight management food and beverages, cultured buttermilk, sour cream, yogurt, skyr, leben, lassi, kefir, powder containing a milk protein, and low-lactose products. In some embodiments, the alternative diary food composition is a cheese composition.

[0022] Also provided herein are solid phase, protein-stabilized emulsions comprising a fusion protein described herein, wherein the emulsions have the ability to stretch to at least 3 cm in length without breaking, as determined by heating a 100-gram mass of the emulsion to a temperature of about 225° C. for 4 minutes and cooling to about 90° C. and pulling with a fork placed beneath the mass.

[0023] Also provided herein are colloidal suspensions comprising a fusion protein described herein, wherein the colloidal suspension has at least one, at least two, or at least three characteristics that are substantially similar to bovine milk selected from taste, appearance, mouthfeel, structure, texture, density, elasticity, springiness, coagulation, binding, leavening, aeration, foaming, creaminess, and emulsification.

[0024] These and other embodiments are described in detail below.

### BRIEF DESCRIPTION OF THE DRAWINGS

[0025] The accompanying figures, which are incorporated herein and form a part of the specification, illustrate some, but not the only or exclusive, example embodiments and/or features. It is intended that the embodiments and figures disclosed herein are to be considered illustrative rather than limiting.

[0026] FIG. 1A-FIG. 1P show expression cassettes having different combinations of fusions between sequences encoding structured and intrinsically unstructured proteins (not to scale). Coding regions and regulatory sequences are indicated as blocks (not to scale). As used in the figures, “L” refers to linker; “Sig” refers to a signal sequence that directs foreign proteins to protein storage vacuoles, “5′ UTR” refers to the 5′ untranslated region, and “KDEL” refers to an endoplasmic reticulum retention signal.

[0027] FIG. 2A-FIG. 2P show expression cassettes having different combinations of fusions between sequences encoding a first protein and a second protein (not to scale), wherein the first and/or second protein is a milk protein (not shown). Coding regions and regulatory sequences are indicated as blocks (not to scale). As used in the figures, “L” refers to linker; “Sig” refers to a signal sequence that directs foreign proteins to protein storage vacuoles, “5′ UTR” refers to the 5′ untranslated region, and “KDEL” refers to an endoplasmic reticulum retention signal.

[0028] FIG. 3 shows the modified pAR15-00 binary vector containing a selectable marker cassette conferring herbicide resistance. Coding regions and regulatory sequences are indicated as blocks (not to scale).

[0029] FIG. 4 shows an example expression cassette comprising a OKC1-T:OLG1 fusion (Optimized Kappa Casein version 1:beta-lactoglobulin version 1, SEQ ID NOs: 71-72), expression of which is driven by PvPhas promoter fused with arc5′UTR:sig10, followed by the ER retention signal (KDEL) and the 3′UTR of the arc5-1 gene, “arc-terminator”. “arc5′UTR” refers to the 5′ untranslated region of the arc5-1 gene. “Sig10” refers to the lectin 1 gene signal peptide. “RB” refers to ribosomal binding site. Coding regions and regulatory sequences are indicated as blocks (not to scale).

[0030] FIG. 5 shows an example expression cassette comprising an OBC-T2:FM: OLG1 fusion (Optimized Beta Casein Truncated version 2: Chymosin cleavage site: beta-lactoglobulin version 1, SEQ ID NOs: 73-74), expression of which driven by PvPhas promoter fused with arc5′UTR: sig10, followed by the 3′UTR of the arc5-1 gene, “arc-terminator”. “arc5′UTR” refers to the 5′ untranslated region of the arc5-1 gene. “Sig10” refers to the lectin 1 gene signal peptide. “RB” refers to ribosomal binding site. Coding regions and regulatory sequences are indicated as blocks (not to scale). The Beta Casein is “truncated” in that the bovine secretion signal is removed and replaced with a plant targeting signal.

[0031] FIG. 6 shows an example expression cassette comprising a OaS1-T:FM: OLG1 fusion (Optimized Alpha S1 Casein Truncated version 1: Chymosin cleavage site: beta-lactoglobulin version 1, SEQ ID NOs: 75-76), expression of which is driven by PvPhas promoter fused with arc5′UTR: sig10, followed by the 3′UTR of the arc5-1 gene, “arc-terminator”. “arc5′UTR” refers to the 5′ untranslated region of the arc5-1 gene. “Sig10” refers to the lectin 1 gene signal peptide. “RB” refers to ribosomal binding site. Coding regions and regulatory sequences are indicated as blocks (not to scale). The Alpha S1 Casein is “truncated” in that the bovine secretion signal is removed and replaced with a plant targeting signal.

[0032] FIG. 7 shows an example expression cassette comprising a para-OKC1-T:FM: OLG1: KDEL fusion (Optimized paraKappa Casein version 1: Chymosin cleavage site: beta-lactoglobulin version 1, SEQ ID NOs: 77-78), expression of which is driven by PvPhas promoter fused with arc5′UTR: sig 10, followed by the ER retention signal (KDEL) and the 3′UTR of the arc5-1 gene, “arc-terminator”. “arc5′UTR” refers to the 5′ untranslated region of the arc5-1 gene. “Sig10” refers to the lectin 1 gene signal peptide. “RB” refers to ribosomal binding site. Coding regions and regulatory sequences are indicated as blocks (not to scale).

[0033] FIG. 8 shows an example expression cassette comprising a para-OKC1-T:FM: OLG1 fusion (Optimized paraKappa Casein version 1: Chymosin cleavage site: beta-lactoglobulin version 1, SEQ ID NOs: 79-80), expression of which is driven by PvPhas promoter fused with arc5′UTR: sig 10, followed by the 3′UTR of the arc5-1 gene, “arc-terminator.” “arc5′UTR” refers to the 5′ untranslated region of the arc5-1 gene. “Sig10” refers to the lectin 1 gene signal peptide. “RB” refers to ribosomal binding site. Coding regions and regulatory sequences are indicated as blocks (not to scale).

[0034] FIG. 9 shows an example expression cassette comprising a OKC1-T: OLG1 fusion (Optimized Kappa Casein version 1: beta-lactoglobulin version 1, SEQ ID NOs: 81-82), expression of which is driven by the promoter and signal peptide of glycinin 1 (GmSeed2: sig2) followed by the ER retention signal (KDEL) and the nopaline synthase gene termination sequence (nos term). Coding regions and regulatory sequences are indicated as blocks (not to scale).

[0035] FIG. 10A-FIG. 10D show protein detection by western blotting. FIG. 10A shows detection of the fusion protein using a primary antibody raised against κ-casein (kCN). The kCN commercial protein is detected at an apparent MW of ˜26 kDa (theoretical: 19 kDa—arrow). The fusion protein is detected at an apparent MW of ˜40 kDa (theoretical: 38 kDa—arrowhead). FIG. 10B shows detection of the fusion protein using a primary antibody raised against β-lactoglobulin (LG). The LG commercial protein is detected at an apparent MW of −18 kDa (theoretical: 18 kDa—arrow). The fusion protein is detected at an apparent MW of ˜40 kDa (theoretical: 38 kDa—arrowhead). FIG. 10C and FIG. 10D show protein gels as control for equal lane loading (image is taken at the end of the SDS run).

[0036] FIG. 11A-FIG. 11E provide a series of illustrations showing potential mechanisms by which casein proteins may be degraded in plant cells, and how fusion of a casein protein with a second protein (i.e., a fusion partner) may lead to accumulation thereof. KCN stands for kappa-casein, BC stands for beta casein, aS1 stands for alphα-S1 casein, aS2 stands for alpha-S2 casein, PTM stands for post-translational modification.

[0037] FIG. 12A and FIG. 12B show two illustrative fusion proteins. In FIG. 12A, a κ-casein protein is fused to a β-lactoglobulin protein. The κ-casein comprises a natural chymosin cleavage site (arrow 1). Cleavage of the fusion protein with rennet (or chymosin) yields two fragments: a para-kappa casein fragment, and a fragment comprising a κ-casein macropeptide fused to β-lactoglobulin. In some embodiments, a second protease cleavage site may be added at the C-terminus of the k-casein protein (i.e., at arrow 2), in order to further allow separation of the κ-casein macropeptide and the β-lactoglobulin. The second protease cleavage site may be a rennet cleavage site (e.g., a chymosin cleavage site), or it may be a cleavage site for a different protease. In FIG. 12B, a para-κ-casein protein is fused directly to β-lactoglobulin. A protease cleavage site (e.g., a chymosin cleavage site) is added between the para-κ-casein and the β-lactoglobulin to allow for separation thereof. By fusing the para-κ-casein directly to the β-lactoglobulin, no κ-casein macropeptide is produced upon cleavage of the fusion by chymosin (or other protease).

[0038] FIG. 13 is a flow-chart showing an illustrative process for producing a food composition comprising an unstructured milk protein, as described herein. Initially, an expression construct for expression of a fusion protein in a plant cell is designed. The construct is transformed into a plant, and the plant is regenerated. Seeds are collected from the plant, and processed (e.g., by seed hulling and grinding) to produce a seed processing composition. Protein is extracted, and optionally enriched and/or concentrated (i.e., to produce a protein concentrate composition). The extracted fusion protein may optionally be cleaved or used directly to produce a food composition.

[0039] FIG. 14A and FIG. 14B are images of a western blot used to detect kappa-casein protein (kCN) in samples comprising soybean total protein extracts (WT) and soybean total protein extracts spiked with 100 ng of KCN in the presence (WT+kCN+Halt) or absence (WT+kCN) of protease inhibitors. 5 μg of total protein was loaded in each lane. FIG. 14A shows protein detected using a primary antibody raised against KCN. FIG. 14B shows total protein, as a loading control (Stain-Free detection by Bio-Rad®).

[0040] FIG. 15A and FIG. 15B are images that show protein detection by western blotting. FIG. 15A shows detection of a fusion protein comprising β-casein and β-lactoglobulin using a primary antibody raised against β-casein (B-CN). Commercial protein was detected at an apparent MW of ˜30 kDa (arrowhead; theoretical: 23.5 kDa). The fusion protein was detected at an apparent MW of ˜40 kDa (arrow; theoretical: 42 kDa). FIG. 15B shows a protein gel as a control for equal lane loading, visualized using stain-free detection by Bio Rad® (image is taken at the end of the SDS run). 5 μg of total protein extracts were loaded per lane.

[0041] FIG. 16A-FIG. 16C shows expression of proteins according to the present disclosure. FIG. 16A shows molecular weight of various proteins, and levels of kappa-casein expression observed in transformed soybeans when those proteins are fused to the kappa-casein. FIG. 16B shows hydrophobicity of various proteins, and levels of kappa-casein expression observed in transformed soybeans when those proteins are fused to the kappa-casein. FIG. 16C shows flexibility of various proteins (i.e., number of disulfide bonds), and levels of kappa-casein expression observed in transformed soybeans when those proteins are fused to the kappa-casein. Expression levels shown in FIG. 16A-FIG. 16C are relative to kappa casein expressed alone (i.e., not as a fusion, KCN only). The values for % KCN only are presented as a log₁₀ scale. Values above 100% indicate that kappa-casein was stabilized by the fusion.

[0042] FIG. 17 is a schematic showing an illustrative process for producing a food composition. The food composition produced according to this method may comprise one or more of: (i) one or more constituent proteins derived from a fusion protein, (ii) the fusion protein itself, or (ii) other protein extracted from the seed that was used to produce the fusion protein.

[0043] FIG. 18 is a schematic that shows how knocking-down or knocking-out the expression and/or activity of one or more proteases in a plant seed may prevent degradation of a casein protein expressed therein. As shown in the schematic, the casein accumulates in the seed at a higher level than in a seed with wildtype levels of protease expression and/or activity.

[0044] FIG. 19 is a schematic demonstrating how the properties of a seed processing composition, or a food composition comprising the same, may be improved if the composition comprises one or more casein proteins. These properties may be improved if the composition comprises a casein protein monomer (i.e., a casein protein that is not part of a fusion protein), or a fusion protein comprising one or more caseins.

[0045] FIG. 20 is a schematic demonstrating an illustrative mechanism that may be used to protect one or more proteins (e.g., casein proteins) from degradation in a host cell, leading to accumulation thereof. The protein (e.g., a casein protein) is fused to one or more proteins that is capable of forming a protein body (e.g., a prolamin). After the fusion protein is synthesized and retained in the endoplasmic reticulum (ER), a protein body is formed (PB). The fusion protein (including, for example, the casein protein) is contained within the PB. Proteases that would degrade the caseins, do not have access to the fusion protein inside the PB. In this figure, the term “PSV” refers to protein storage vacuole.

[0046] FIG. 21 shows protein detection by western blotting. The top panel shows detection of a fusion protein comprising β-casein and casein using a primary antibody raised against β-casein (B-CN). Commercial protein was detected at an apparent MW of ˜30 kDa (arrowhead; theoretical: 23.5 kDa). The fusion protein was detected at an apparent MW of ˜50 kDa (arrow; theoretical: 44.3 kDa). The first lane shows molecular weight markers. The second lane shows protein from T1 seed from recombinant plant line KV7. Lane 3-7 shows soybean wildtype seed extracts spiked with 0%, 1%, 2%, 4%, or 6% TSP commercially available β-casein. The bottom panel shows a protein gel as a control for equal lane loading, visualized using stain-free detection by Bio Rad® (image is taken at the end of the SDS run). 2.5 μg of total protein extracts were loaded per lane.

[0047] FIG. 22 shows protein detection by western blotting. The top panel shows detection of a fusion protein comprising β-casein and a partial zein (amino acids 17-112) using a primary antibody raised against β-casein (B-CN). Commercial protein was detected at an apparent MW of ˜30 kDa (arrowhead; theoretical: 23.5 kDa). The fusion protein was detected at an apparent MW of ˜30 kDa (arrow; theoretical: 23.5 kDa). The first four lanes show protein from T1 seed from a recombinant plant. The fifth lane shows molecular weight markers. Lanes 6-9 shows soybean wildtype seed extracts spiked with 0%, 1.5%, 2.5%, or 5% TSP commercially available β-casein. The bottom panel shows a protein gel as a control for equal lane loading, visualized using stain-free detection by Bio Rad® (image is taken at the end of the SDS run). 2.5 μg of total protein extracts were loaded per lane.

[0048] FIG. 23 shows a binary Agrobacterium vector used to co-express a Gene of Interest (GOI, e.g., a casein protein) and a kinase (e.g., a Fam20C kinase) in a plant cell.

[0049] FIG. 24A-FIG. 24E shows expression constructs used to co-express a Gene of Interest (GOI, e.g., a casein protein) and a kinase (e.g., a Fam20C kinase) in a plant cell.

[0050] FIG. 25A-FIG. 25F show expression constructs used to express a Gene of Interest (GOI, e.g., a casein protein) in a plant cell, wherein the GOI is fused to a glycoprotein tag, such as a (SP)11 tag.

[0051] FIG. 26A-FIG. 26G shows expression constructs used to co-express a Gene of Interest (GOI, e.g., a casein protein) and a protein capable of inducing a protein body (e.g., a prolamin, zein, canein, hydrophobin, or elastin-like protein) in a plant cell.

[0052] FIG. 27 shows a binary Agrobacterium vector used to co-express a Gene of Interest (GOI, e.g., a casein protein) and a protein capable of inducing a protein body in a plant cell.

[0053] FIG. 28 is a photograph which depicts the melting properties of various cheese compositions made with isolated kappa and beta-caseins. Top left: composition A (75% kappa-casein, 25% beta-casein); top right: composition B (100% kappa-casein); bottom left: composition C (50% kappa-casein, 50% beta-casein), bottom right: composition A (100% beta-casein).

[0054] FIG. 29 is a line graph showing cheese stretch with increasing contribution of protein from beta-casein (see also Tables 23-28).

[0055] FIG. 30 is a line graph showing melt scores of cheese compositions comprising one or more of beta-casein, kappa-casein and alpha casein (see also Tables 23-28).

[0056] FIG. 31 is a line graph showing stretch of cheese compositions comprising one or more of beta-casein, kappa-casein and alpha casein (see also Tables 23-28).

[0057] FIG. 32 is a graph showing estimated apparent viscosity (in centipoise (cP)) at shear rates in the range of 0.01 to 1000 sec⁻¹ for a milk composition comprising beta-casein as the only casein (BC milk), a yogurt composition comprising beta-casein as the only casein (BC yogurt), and an ice cream mix composition comprising beta-casein as the only casein (BC IC mix).

[0058] FIG. 33 is a western blot showing expression of a beta-casein tetramer (BC4) in E. Coli. Commercial beta-casein, in monomeric form, was detected at an apparent molecular weight of ˜30 kDA (theoretical: 23.5 kDa—arrowhead). The BC4 fusion protein was detected at an apparent MW of ˜100 kDa (theoretical: 94 kDa—arrow).

[0059] FIG. 34 is a western blot showing expression of a fusion protein comprising beta-casein and beta-lactoglobulin in tobacco leaves. Commercial beta-casein, in monomeric form, was detected at an apparent molecular weight of ˜30 kDa (theoretical: 23.5 kDa—arrowhead). The fusion protein was detected at an apparent MW of ˜48 kDa (theoretical: 42 kDa—arrow).

[0060] FIG. 35 is a graphic depicting the anthocyanin metabolic pathway in soybean.

[0061] FIG. 36A and FIG. 36B show exemplary strategies whereby a pigmentation-expressing cassette and dairy-expressing cassette are in the same T-DNA so the two traits will co-segregate.

[0062] FIG. 37A-FIG. 37C show pigmented soybeans according to the present disclosure. FIG. 37A shows an exemplary strategy employing a stable pigmented line that can be crossed with a stable high dairy-expressing line to induce pigmentation (e.g., Overexpression of MYB TFs in seed coat). Representative phenotypes of developing seeds are shown. Black arrows point to the dissected seed coat. Pigment accumulation is specific to the seed coat. FIG. 37B shows results of the same strategy except depicted are representative phenotypes of harvested seeds for the Myb factors. Pigment accumulation is specific to the seed coat. FIG. 37C shows representative phenotypes of harvested seeds generated using strategy 2 for the chalcone synthase.

[0063] FIG. 38 is a graphic of a light microscopy picture of soybean (G. max) seeds analyzed by micro-PIXE.

[0064] FIG. 39A depicts a AR03-04 expression vector with an expression cassette comprising i) AR-Pro3 promoter, ii) AR-Pro3 signal sequence, iii) DNA insert of interest (e.g., OKC1-T: Optimized Kappa Casein Truncated version 1), iv) NOS terminator. For the targeted gene editing, the expression cassette of the AR03-12 vector further comprises i) RNA-guided nuclease gene driven by GmEf1A promoter, ii) a first guide RNA expression cassette containing a first Glycinin target sequence and iii) a second guide RNA expression cassette including a second Glycinin target sequence. This expression vector is used for dual function of i) expressing protein of interest and ii) suppressing, decreasing, and/or nullifying expression of target proteins (e.g., Glycinin 4 and Glycinin 5) in plant seeds. FIG. 39B illustrates an exemplary diagram of an expression cassette designed for stacking three transgenes, each of which encodes κ-casein protein. Three differentially codon optimized transgenes encoding κ-casein protein are driven under the control of three different seed promoters; 1) BnNap (Brassica Napin) promoter (AR-Pro 11) BconB (Beta-conglycinin B subunit) promoter (AR-Pro 13), and GmSeed2 (AR-Pro14) promoter. FIG. 39C illustrates a diagram of a total Amino Acid Rebalancing-based Method for Target Identification. The amino acid rebalancing profile is obtained by calculation of the % difference (A %) of amino acid compositions between protein of interest and plant seed of interest (total). FIG. 39D illustrates a diagram of an individual Amino Acid Rebalancing-based Method for Target Identification. The amino acid rebalancing profile is obtained by calculation of the % difference (A %) of amino acid compositions between protein of interest and highly expressed seed storage proteins in plant seed of interest (individual).

[0065] FIG. 40A-FIG. 40D show vector maps encoding exemplary fusion proteins. FIG. 40A shows a vector map comprising a nucleic acid encoding for a Beta-casein-FM-AlphaS1-casein-FM-AlphaS1-casein-FM-Beta-casein fusion protein. FIG. 40B shows a vector map comprising a nucleic acid encoding for a Beta-casein-Beta-casein-Kappa-casein-Beta-lactoglobulin fusion protein. FIG. 40C shows a vector map comprising a nucleic acid encoding for a Beta-casein-Beta-casein-Beta-casein-Beta-casein fusion protein. FIG. 40D shows a vector map comprising a nucleic acid encoding for a Gamma-Zein-Beta-casein fusion protein.

[0066] FIG. 41 shows blots comparing beta-casein fusion protein expression in E-coli vs transgenic soy seeds. Left panel: Lane 1-2: Two lanes each containing BCN, BCNx4, BCN-BCN-KCN-LG, or BCN-aS1-aS1-BCN protein expressed in E. coli after induction with IPTG. Lane 9-11: Standard of BCN commercial protein spiked in at 150, 75, and 38 ng per lane. Right Panel, lane 12-19: Two lanes each containing BCN, BCNx4, BCN-BCN-KCN-LG, or BCN-aS1-aS1-BCN protein expressed in soy seeds. Lane 20: Molecular weight markers. Detection of the fusion protein using a primary antibody raised against BCN. The BCN protein is detected at an apparent MW of −25 kDa (theoretical: 23.5 kDa—gray arrow). The BCNx4 fusion protein is detected at an apparent MW of −100 kDa (theoretical: 94 kDa—orange arrow). The BCN-BCN-KCN-LG fusion protein is detected at an apparent MW of −90 kDa (theoretical: 84.5 kDa—blue arrow). The BCN-aS1-aS1-BCN fusion protein is detected at an apparent MW of −100 kDa (theoretical: 93 kDa—yellow arrow). The BCN commercial protein is detected at an apparent MW of −30 kDa (theoretical: 23.5 kDa—black arrow). Left panel shows control for total protein loading—Stain free detection by Bio-Rad. The amount of total protein extract (μg) loaded is indicated below each lane.

[0067] FIG. 42 depicts a graph illustrating the fatty acid modulation techniques of the present disclosure. Plant-based food compositions can differ in their fatty acid profiles compared to animal-based counterparts. Blending of small chain fatty acids can modulate the fatty acid profile so that it better mimics that of the corresponding animal product. For example, soy-based buttery spread containing mammalian milk proteins and soybean oil (circle markers) can be supplemented with palm oil and coconut oil to better mimic the properties of butter (box markers). The resulting product (triangle markers) is expected to have improved organoleptic properties.

[0068] FIG. 43 shows sequences and predicted phosphorylated sites in beta-casein, kappa-casein, OaS1, and OsS2.

[0069] FIG. 44A and FIG. 44B show food compositions according to the present disclosure. FIG. 44A shows a graphic of a pizza with a mozzarella-style cheese generated according to methods of the disclosure. FIG. 44B shows a graphic of a soft cheese generated using methods of the disclosure.

[0070] FIG. 45A-FIG. 45D depict exemplary universal vector constructs according to the present disclosure.

[0071] FIG. 46A-FIG. 46G depict exemplary universal vector constructs according to the present disclosure.

[0072] FIGS. 47A and 47B show expression of universal vectors according to the present disclosure. FIG. 47A shows ELISA data of protein expression of plants transformed with exemplary constructs. FIG. 47B shows western blot data of protein expression of plants transformed with exemplary constructs.

[0073] FIG. 48A-FIG. 48J shows functional properties of various food compositions. FIG. 48A shows a combined score (sum of melt and stretch) of exemplary cheeses generated using different ratios of soy: casein. FIG. 48B shows an image of a cheese generated using alpha casein and beta casein at a soy to casein ratio of 1:1. FIG. 48C shows an image of a cheese generated using alpha casein and beta casein at a soy to casein ratio of 1:1. FIG. 48D shows an image of a cheese generated using no dairy protein at a soy to casein ratio of 0:1. FIG. 48E shows an image of a cheese generated using rennet casein at a soy to casein ratio of 1:1. FIG. 48F shows an image of a cheese generated using rennet casein at a soy to casein ratio of 3:1. FIG. 48G shows an image of a cheese generated using alpha casein and beta casein at a soy to casein ratio of 1:1. FIG. 48H shows an image of a cheese generated using alpha casein and beta casein at a soy to casein ratio of 3:1. FIG. 48I shows an image of a cheese generated using rennet casein at a soy to casein ratio of 1:1. FIG. 48J shows an image of a cheese generated using rennet casein at a soy to casein ratio of 3:1.

### DETAILED DESCRIPTION OF THE DISCLOSURE

[0074] While various embodiments of the disclosure have been shown and described herein, it will be obvious to those skilled in the art that such embodiments are provided by way of example only. Numerous variations, changes, and substitutions may occur to those skilled in the art without departing from the disclosure. It should be understood that various alternatives to the embodiments of the disclosure described herein may be employed

[0075] Provided herein are compositions and methods for producing milk proteins, which allow for safe, sustainable and humane production of milk proteins for commercial use, such as use in food compositions. The disclosure provides recombinant fusion proteins comprising at least first protein and a second protein, wherein at least one of the first protein and the second protein is a milk protein, or fragment thereof. The disclosure also provides methods for producing the recombinant fusions proteins, and food compositions comprising the same.

[0076] Also provided herein are alternative dairy compositions, solid phase protein-stabilized emulsions, cheese compositions, and colloidal suspensions, comprising one or more casein proteins, wherein the casein proteins are isolated or recombinant, and are selected from the group consisting of kappa-casein, para-kappa-casein, beta-casein, alpha-S1-casein, and alpha-S2-casein. The compositions, emulsions, or suspensions may be used to produce food compositions that have organoleptic properties similar to traditional dairy compositions.

[0077] The following description includes information that may be useful in understanding the present disclosure. It is not an admission that any of the information provided herein is prior art or relevant to the presently claimed disclosures, or that any publication specifically or implicitly referenced is prior art.

### Definitions

[0078] While the following terms are believed to be well understood by one of ordinary skill in the art, the following definitions are set forth to facilitate explanation of the presently disclosed subject matter.

[0079] All technical and scientific terms used herein, unless otherwise defined below, are intended to have the same meaning as commonly understood by one of ordinary skill in the art. References to techniques employed herein are intended to refer to the techniques as commonly understood in the art, including variations on those techniques and/or substitutions of equivalent techniques that would be apparent to one of skill in the art.

[0080] Any ranges listed herein are intended to be inclusive of endpoints. For example, a range of 2-4 includes 2 and 4.

[0081] As used herein, the singular forms “a,” “an,” and “the: include plural referents unless the content clearly dictates otherwise.

[0082] The term “about” or “approximately” when immediately preceding a numerical value means a range (e.g., plus or minus 10% of that value). For example, “about 50” can mean 45 to 55, “about 25,000” can mean 22,500 to 27,500, etc., unless the context of the disclosure indicates otherwise, or is inconsistent with such an interpretation. For example, in a list of numerical values such as “about 49, about 50, about 55, . . . ”, “about 50” means a range extending to less than half the interval(s) between the preceding and subsequent values, e.g., more than 49.5 to less than 52.5. Furthermore, the phrases “less than about” a value or “greater than about” a value should be understood in view of the definition of the term “about” provided herein. Similarly, the term “about” when preceding a series of numerical values or a range of values (e.g., “about 10, 20, 30” or “about 10-30”) refers, respectively to all values in the series, or the endpoints of the range.

[0083] As used herein, “mammalian milk” can refer to milk derived from any mammal, such as bovine, human, goat, sheep, camel, buffalo, water buffalo, dromedary, llama and any combination thereof. In some embodiments, a mammalian milk is a bovine milk.

[0084] As used herein, “structured” refers to those proteins having a well-defined secondary and tertiary structure, and “unstructured” refers to proteins that do not have well defined secondary and/or tertiary structures. An unstructured protein may also be described as lacking a fixed or ordered three-dimensional structure. “Disordered” and “intrinsically disordered” are synonymous with unstructured.

[0085] As used herein, “rennet” refers to a set of enzymes typically produced in the stomachs of ruminant mammals. Chymosin, its key component, is a protease enzyme that cleaves κ-casein (to produce para-κ-casein and a macropeptide (see e.g., FIG. 12)). In addition to chymosin, rennet contains other enzymes, such as pepsin and lipase. Rennet is used to separate milk into solid curds (for cheesemaking) and liquid whey. Rennet or rennet substitutes are used in the production of many cheeses.

[0086] As used herein “whey” refers to the liquid remaining after milk has been curdled and strained, for example during cheesemaking. Whey comprises a collection of globular proteins, typically a mixture of β-lactoglobulin, α-lactalbumin, bovine serum albumin, and immunoglobulins.

[0087] The term “plant” includes reference to whole plants, plant organs, plant tissues, and plant cells and progeny of same, but is not limited to angiosperms and gymnosperms such as Arabidopsis, potato, tomato, tobacco, alfalfa, lettuce, carrot, strawberry, sugar beet, cassava, sweet potato, soybean, lima bean, pea, chickpea, maize (corn), turf grass, wheat, rice, barley, sorghum, oat, oak, eucalyptus, walnut, palm, and duckweed as well as fern and moss. Thus, a plant may be a monocot, a dicot, a vascular plant reproduced from spores such as fern or a nonvascular plant such as moss, liverwort, hornwort, and algae. The word “plant,” as used herein, also encompasses plant cells, seeds, plant progeny, propagule whether generated sexually or asexually, and descendants of any of these, such as cuttings or seed. Plant cells include suspension cultures, callus, embryos, meristematic regions, callus tissue, leaves, roots, shoots, gametophytes, sporophytes, pollen, seeds, and microspores. Plants may be at various stages of maturity and may be grown in liquid or solid culture, or in soil or suitable media in pots, greenhouses, or fields. Expression of an introduced leader, trailer or gene sequences in plants may be transient or permanent.

[0088] The term “vascular plant” refers to a large group of plants that are defined as those land plants that have lignified tissues (the xylem) for conducting water and minerals throughout the plant and a specialized non-lignified tissue (the phloem) to conduct products of photosynthesis. Vascular plants include the clubmosses, horsetails, ferns, gymnosperms (including conifers) and angiosperms (flowering plants). Scientific names for the group include Tracheophyta and Tracheobionta. Vascular plants are distinguished by two primary characteristics. First, vascular plants have vascular tissues which distribute resources through the plant. This feature allows vascular plants to evolve to a larger size than non-vascular plants, which lack these specialized conducting tissues and are therefore restricted to relatively small sizes. Second, in vascular plants, the principal generation phase is the sporophyte, which is usually diploid with two sets of chromosomes per cell. Only the germ cells and gametophytes are haploid. By contrast, the principal generation phase in non-vascular plants is the gametophyte, which is haploid with one set of chromosomes per cell. In these plants, only the spore stalk and capsule are diploid.

[0089] The term “non-vascular plant” refers to a plant without a vascular system consisting of xylem and phloem. Many non-vascular plants have simpler tissues that are specialized for internal transport of water. For example, mosses and leafy liverworts have structures that look like leaves, but are not true leaves because they are single sheets of cells with no stomata, no internal air spaces and have no xylem or phloem. Non-vascular plants include two distantly related groups. The first group are the bryophytes, which is further categorized as three separate land plant Divisions, namely Bryophyta (mosses), Marchantiophyta (liverworts), and Anthocerotophyta (hornworts). In all bryophytes, the primary plants are the haploid gametophytes, with the only diploid portion being the attached sporophyte, consisting of a stalk and sporangium. Because these plants lack lignified water-conducting tissues, they can't become as tall as most vascular plants. The second group is the algae, especially the green algae, which consists of several unrelated groups. Only those groups of algae included in the Viridiplantae are still considered relatives of land plants.

[0090] The term “plant part” refers to any part of a plant including but not limited to the embryo, shoot, root, stem, seed, stipule, leaf, petal, flower bud, flower, ovule, bract, trichome, branch, petiole, intemode, bark, pubescence, tiller, rhizome, frond, blade, ovule, pollen, stamen, and the like. The two main parts of plants grown in some sort of media, such as soil or vermiculite, are often referred to as the “above-ground” part, also often referred to as the “shoots”, and the “below-ground” part, also often referred to as the “roots”.

[0091] The term “plant tissue” refers to any part of a plant, such as a plant organ. Examples of plant organs include, but are not limited to the leaf, stem, root, tuber, seed, branch, pubescence, nodule, leaf axil, flower, pollen, stamen, pistil, petal, peduncle, stalk, stigma, style, bract, fruit, trunk, carpel, sepal, anther, ovule, pedicel, needle, cone, rhizome, stolon, shoot, pericarp, endosperm, placenta, berry, stamen, and leaf sheath.

[0092] The term “seed” is meant to encompass the whole seed and/or all seed components, including, for example, the coleoptile and leaves, radicle and coleorhiza, scutellum, starchy endosperm, aleurone layer, pericarp and/or testa, either during seed maturation and seed germination.

[0093] “Microorganism” and “microbe” mean any microscopic unicellular organism and can include bacteria, algae, yeast, or fungi.

[0094] The term “transgenic” means an organism that has been transformed with one or more exogenous nucleic acids from another species. “Transformation” refers to a process by which a nucleic acid is introduced into a cell, either transiently or stably. Transformation may rely on any known method for the insertion of nucleic acid sequences into a prokaryotic or eukaryotic host cell, including Agrobacterium-mediated transformation protocols, viral infection, whiskers, electroporation, heat shock, lipofection, polyethylene glycol treatment, micro-injection, and particle bombardment.

[0095] “Stably integrated” refers to the permanent, or non-transient retention and/or expression of a polynucleotide in and by a cell genome. Thus, a stably integrated polynucleotide is one that is a fixture within a transformed cell genome and can be replicated and propagated through successive progeny of the cell or resultant transformed plant. Transformation may occur under natural or artificial conditions using various methods well known in the art. Transformation may rely on any known method for the insertion of nucleic acid sequences into a prokaryotic or eukaryotic host cell, including Agrobacterium-mediated transformation protocols, viral infection, whiskers, electroporation, heat shock, lipofection, polyethylene glycol treatment, micro-injection, and particle bombardment.

[0096] As used herein, the terms “stably expressed” or “stable expression” refer to expression and accumulation of a protein in a plant cell. In some embodiments, a protein may accumulate because it is not degraded by endogenous plant proteases. In some embodiments, a protein is considered to be stably expressed in a plant if it is present in the plant in an amount of 1% or higher per total protein weight of soluble protein extractable from the plant.

[0097] As used herein, the term “fusion protein” refers to a protein comprising at least two constituent proteins (or fragments or variants thereof, as defined below) that are encoded by separate genes, and that have been joined so that they are transcribed and translated as a single polypeptide. In some embodiments, a fusion protein may be separated into its constituent proteins, for example by cleavage with a protease.

[0098] The term “recombinant” refers to nucleic acids or proteins formed by laboratory methods of genetic recombination (e.g., molecular cloning) to bring together genetic material from multiple sources, creating sequences that would not otherwise be found in the genome. A recombinant fusion protein is a protein created by combining sequences encoding two or more constituent proteins, such that they are expressed as a single polypeptide. Recombinant fusion proteins may be expressed in vivo in various types of host cells, including plant cells, bacterial cells, fungal cells, mammalian cells, etc. Recombinant fusion proteins may also be generated in vitro.

[0099] The term “promoter” or a “transcription regulatory region” refers to nucleic acid sequences that influence and/or promote initiation of transcription. Promoters are typically considered to include regulatory regions, such as enhancer or inducer elements. The promoter will generally be appropriate to the host cell in which the target gene is being expressed. The promoter, together with other transcriptional and translational regulatory nucleic acid sequences (also termed “control sequences”), is necessary to express any given gene. In general, the transcriptional and translational regulatory sequences include, but are not limited to, promoter sequences, ribosomal binding sites, transcriptional start and stop sequences, translational start and stop sequences, and enhancer or activator sequences.

[0100] The term signal peptide—also known as “signal sequence”, “targeting signal”, “localization signal”, “localization sequence”, “transit peptide”, “leader sequence”, or “leader peptide”, is used herein to refer to an N-terminal peptide which directs a newly synthesized protein to a specific cellular location or pathway. Signal peptides are often cleaved from a protein during translation or transport and are therefore not typically present in a mature protein.

[0101] The term “proteolysis” or “proteolytic” or “proteolyze” means the breakdown of proteins into smaller polypeptides or amino acids. Uncatalyzed hydrolysis of peptide bonds is extremely slow. Proteolysis is typically catalyzed by cellular enzymes called proteases, but may also occur by intra-molecular digestion. Low pH or high temperatures can also cause proteolysis non-enzymatically. Limited proteolysis of a polypeptide during or after translation in protein synthesis often occurs for many proteins. This may involve removal of the N-terminal methionine, signal peptide, and/or the conversion of an inactive or non-functional protein to an active one.

[0102] The term “2A peptide”, used herein, refers to nucleic acid sequence encoding a 2A peptide or the 2A peptide itself. The average length of 2A peptides is 18-22 amino acids. The designation “2A” refers to a specific region of picornavirus polyproteins and arose from a systematic nomenclature adopted by researchers. In foot-and-mouth disease virus (FMDV), a member of Picornaviridae family, a 2A sequence appears to have the unique capability to mediate cleavage at its own C-terminus by an apparently enzyme-independent, novel type of reaction. This sequence can also mediate cleavage in a heterologous protein context in a range of eukaryotic expression systems. The 2A sequence is inserted between two genes of interest, maintaining a single open reading frame. Efficient cleavage of the polyprotein can lead to co-ordinate expression of active two proteins of interest. Self-processing polyproteins using the FMDV 2A sequence could therefore provide a system for ensuring coordinated, stable expression of multiple introduced proteins in cells including plant cells.

[0103] The term “purifying” is used interchangeably with the term “isolating” and generally refers to the separation of a particular component from other components of the environment in which it was found or produced. For example, purifying a recombinant protein from plant cells in which it was produced typically means subjecting transgenic protein containing plant material to biochemical purification and/or column chromatography.

[0104] When referring to expression of a protein in a specific amount per the total protein weight of the soluble protein extractable from the plant (“TSP”), it is meant an amount of a protein of interest relative to the total amount of protein that may reasonably be extracted from a plant using standard methods. The weight assigned to a fusion protein within total soluble protein fraction is only the weight corresponding to the referenced protein. A protein fraction comprising 2 grams of a casein-casein fusion within 100 grams TSP, the casein will be considered to represent 2% of TSP. Weights for fusions comprising different proteins will be measured by multiplying the weight of the total fusion protein by the percent of amino acids corresponding to that protein within the fusion. Thus, a protein fraction comprising 10 grams of a fusion protein (comprised of a 60 AA first protein fused to a 40 AA second protein) within a 100-gram TSP, the wt % content of the first protein would be 6%, and the wt % content of the second protein would be 4%. Amino acids corresponding to portions of the fusion that cannot be assigned any of the fusion monomers (e.g., linker sequence), are not counted in wt % calculations. Methods for extracting total protein from a plant are known in the art. For example, total protein may be extracted from seeds by bead beating seeds at about 15000 rpm for about 1 min. The resulting powder may then be resuspended in an appropriate buffer (e.g., 50 mM Carbonate-Bicarbonate pH 10.8, 1 mM DTT, 1× Protease Inhibitor Cocktail). After the resuspended powder is incubated at about 4° C. for about 15 minutes, the supernatant may be collected after centrifuging (e.g., at 4000 g, 20 min, 4° C.). Total protein may be measured using standard assays, such as a Bradford assay. The amount of protein of interest may be measured using methods known in the art, such as an ELISA or a Western Blot.

[0105] Sections of this disclosure refer to ratios between a first and second protein (e.g., a ratio by weight). When calculating ratios involving fusion proteins, the weight assigned to an individual protein within the fusion corresponds to percent of amino acids corresponding to that individual protein within the fusion. For example, the ratio between 10 grams of first protein and 10 grams of second protein, wherein the first protein is a casein-casein fusion, would be 1:1, because 100% of the fusion weight would be assigned to casein. In contrast, if the fusion protein is between an A-B fusion in which protein A was 50 AA and protein B was 50AA, then the ratio of protein A to the second protein would be 1:2, and the ratio of protein B to the second protein would be 1:2. Amino acids corresponding to portions of the fusion that cannot be assigned any of the fusion monomers (e.g., linker sequence), are not counted in these ratios.

[0106] When referring to a nucleic acid sequence or protein sequence, the term “identity” is used to denote similarity between two sequences. Unless otherwise indicated, percent identities described herein are determined using the BLAST algorithm available at the world wide web address: blast.ncbi.nlm.nih.gov/Blast.cgi using default parameters.

[0107] As used herein, the terms “dicot” or “dicotyledon” or “dicotyledonous” refer to a flowering plant whose embryos have two seed leaves or cotyledons. Examples of dicots include, but are not limited to, Arabidopsis, tobacco, tomato, potato, sweet potato, cassava, alfalfa, lima bean, pea, chickpea, soybean, carrot, strawberry, lettuce, oak, maple, walnut, rose, mint, squash, daisy, Quinoa, buckwheat, mung bean, cow pea, lentil, lupin, peanut, fava bean, French beans (i.e., common beans), mustard, or cactus.

[0108] The terms “monocot” or “monocotyledon” or “monocotyledonous” refer to a flowering plant whose embryos have one cotyledon or seed leaf. Examples of monocots include, but are not limited to turf grass, maize (corn), rice, oat, wheat, barley, sorghum, orchid, iris, lily, onion, palm, and duckweed.

[0109] As used herein, a “low lactose product” is any food composition considered by the FDA to be “lactose reduced”, “low lactose”, or “lactose free”.

[0110] As used herein, a “milk protein” is any protein, or fragment or variant thereof, that is typically found in one or more mammalian milks. In some embodiments, the milk proteins described herein are casein proteins, such as kappa-casein, para-kappa-casein, beta-casein, alpha-S1-casein, and alpha-S2-casein.

[0111] As used herein, a “non-milk” protein is any protein that is not typically found in any mammalian milk composition. One non-limiting example of a non-milk protein is green fluorescent protein (GFP).

[0112] As used herein, a “caseinate” is a compound derived from casein. Caseinates may be produced by adding acid to skim milk to reduce the pH to about 4.6, which causes the casein proteins to be precipitated. The resulting curd is rinsed and dried to produce acid casein. Acid casein is typically insoluble without further treatment, such as pH adjustment. Acid casein either before or after drying can be mixed with a base such as sodium hydroxide to produce sodium caseinate, or calcium hydroxide to produce calcium caseinate.

[0113] As used herein, an “alternative dairy composition” is a composition that comprises an isolated, or recombinant, casein protein, and may also comprise variations of the composition, such as a low-fat alternative dairy composition.

[0114] As used herein, the phrase “solid phase, protein-stabilized emulsion” refers to a homogenous and stable emulsion that is a solid at room temperature. The solid-phase, protein stabilized emulsions described herein is formed by the protein reducing the interfacial tension between the continuous aqueous phase and discontinuous lipid phase by aligning and/or unfolding at the interface. The amphiphilic nature of proteins allows them to interact with both phases and association between proteins in the aqueous phase results in decreased mobility of water in the form of increased viscosity and/or solid like behavior at different temperatures. The presence of “emulsifying salts” can enhance the emulsifying properties of the proteins.

[0115] As used herein, “cheese” refers to a food that is produced by curdling animal-derived milk. The milk may be curdled using, for example, enzymes (e.g., rennet), or using acid.

[0116] As used herein, “cheese composition” refers to a food that is produced by combining one or more milk proteins, optionally with other ingredients, as described herein. For example, cheese compositions may be produced using one or more recombinant milk proteins, or one or more milk proteins isolated from bovine milk. The cheese compositions may, in some embodiments, include only one milk protein. In some embodiments, the cheese compositions may comprise 2, 3, or 4 milk proteins. In some embodiments, the cheese compositions may comprise one or more milk proteins in a ratio that does not occur in the milk produced by any mammal (i.e., a non-naturally occurring ratio).

[0117] As used herein, the term “melt”, “melting”, or “meltability” refers to the liquefaction of cheese or a cheese composition by heat.

[0118] As used herein, the term “viscosity” or “flow” refers to the tendency of cheese (or a cheese composition) to spread and flow when completely melted.

[0119] As used herein, the term “stretch”, “stretching”, or “stretchability” refers to the formation of fibrous strands of cheese (or a cheese composition) that elongate without breaking.

[0120] As used herein, the term “oiling-off” refers to the tendency of free oil separation from melted cheese or a cheese composition (also known as fat leakage).

[0121] As used herein, the term “browning” or “blistering” refers to the trapped pockets of heated air and steam that may be scorched during baking with cheese (or a cheese composition).

[0122] As used herein, the term “whitening” or “decolorization” refers to the bleaching of cheese (or a cheese composition).

[0123] As used herein, the term “spread”, “spreading” or “spreadability” refers to the ability of cheese or a cheese composition to spread over a surface on application of slight force to form a layer, thin enough to form a coating.

[0124] The term “ash” is used herein as it is well known in the art, and means one or more ions, elements, minerals and/or compounds that may be found in mammalian produced milk. Ash may comprise one or more of sodium, potassium, calcium, magnesium, phosphorus, iron, copper, zinc, chloride, manganese, selenium, iodine, phosphate, citrate, sulfate, and carbonate. In some embodiments, ash may comprise calcium carbonate and/or sodium citrate.

### Milk Proteins

[0125] The fusion proteins described herein may comprise one or more milk proteins. In some embodiments, the fusion proteins described herein may comprise a first protein and a second protein, wherein the first protein and/or second protein is a milk protein. In some embodiments, the first protein and the second protein are both milk proteins. As used herein the term “milk protein” refers to any protein, that is typically found in one or more mammalian milks. In some embodiments, “milk protein” encompasses fragments of milk proteins lacking the signal peptide, as defined in this disclosure. Thus, in some embodiments, the term “milk protein” refers to the “mature” protein that is present in milk. Examples of mammalian milk include, but are not limited to, milk produced by a cow, human, goat, sheep, camel, horse, donkey, dog, cat, elephant, monkey, mouse, rat, hamster, guinea pig, whale, dolphin, seal, sheep, buffalo, water buffalo, dromedary, llama, yak, zebu, reindeer, mole, otter, weasel, wolf, raccoon, walrus, polar bear, rabbit, or giraffe. Some representative examples of milk protein species of the disclosure can be found in Table 34.

[0126] The composition of milk varies depending on the mammal. For example, as shown below in Table 1, cow milk comprises β-lactoglobulin, α-S1-casein, and α-S2-casein, whereas human milk does not. However, for the purposes of this disclosure, β-lactoglobulin, α-S1-casein, and α-S2-casein are considered milk proteins.

TABLE 1
Protein composition of human and cow milk

| Protein | Human milk (mg/mL) | Bovine (cow) milk (mg/mL) |
|---|---|---|
| α-lactalbumin | 2.2 | 1.2 |
| α-s1-casein | 0 | 11.6 |
| α-s2-casein | 0 | 3.0 |
| β-casein | 2.2 | 9.6 |
| κ-casein | 0.4 | 3.6 |
| γ-casein | 0 | 1.6 |
| Immunoglobulins | 0.8 | 0.6 |
| Lactoferrin | 1.4 | 0.3 |
| β-lactoglobulin | 0 | 3.0 |
| Lysozyme | 0.5 | Traces |
| Serum albumin | 0.4 | 0.4 |
| Other | 0.8 | 0.6 |

[0127] Illustrative milk proteins that may be used in the fusion proteins of the disclosure include, but are not limited to, α-S1 casein, α-S2 casein, β-casein, κ-casein, para-κ-casein, β-lactoglobulin, α-lactalbumin, lysozyme, lactoferrin, lactoperoxidase, serum albumin, and immunoglobulins (e.g., IgA, IgG, IgM, IgE).

[0128] Milk proteins may be further classified as structured or unstructured proteins. An “unstructured milk protein” is a milk protein that lacks a defined secondary structure, a defined tertiary structure, or a defined secondary and tertiary structure. Whether a milk protein is unstructured may be determined using a variety of biophysical and biochemical methods known in the art, such as small angle X-ray scattering, Raman optical activity, circular dichroism, nuclear magnetic resonance (NMR) and protease sensitivity. In some embodiments, a milk protein is considered to be unstructured if it is unable to be crystallized using standard techniques.

[0129] Illustrative unstructured milk proteins that may be used in the fusion proteins of the disclosure includes members of the casein family of proteins, such as α-S1 casein, α-S2 casein, β-casein, and κ-casein. The caseins are phosphoproteins and make up approximately 80% of the protein content in bovine milk and about 20-45% of the protein in human milk. Caseins form a multi-molecular, granular structure called a casein micelle in which some enzymes, water, and salts, such as calcium and phosphorous, are present. The micellar structure of casein in milk is significant in terms of a mode of digestion of milk in the stomach and intestine and a basis for separating some proteins and other components from cow milk. In practice, casein proteins in bovine milk can be separated from whey proteins by acid precipitation of caseins, by breaking the micellar structure by partial hydrolysis of the protein molecules with proteolytic enzymes, or microfiltration to separate the smaller soluble whey proteins from the larger casein micelle. Caseins are relatively hydrophobic, making them poorly soluble in water.

[0130] In some embodiments, the casein proteins described herein (e.g., α-S1 casein, α-S2 casein, β-casein, and/or κ-casein) are isolated or derived from cow (Bos taurus), goat (Capra hircus), sheep (Ovis aries), water buffalo (Bubalus bubalis), dromedary camel (Camelus dromedaries), bactrian camel (Camelus bactrianus), wild yak (Bos mutus), horse (Equus caballus), donkey (Equus asinus), reindeer (Rangifer tarandus), eurasian elk (Alces alces), alpaca (Vicugna pacos), zebu (Bos indicus), llama (Lama glama), or human (Homo sapiens). In some embodiments, a casein protein (e.g., α-S1 casein, α-S2 casein, β-casein, or κ-casein) has at least 80%, at least 85%, at least 90%, at least 95%, at least 96%, at least 97%, at least 98%, or at least 99% identity with a casein protein from one or more of cow (Bos taurus), goat (Capra hircus), sheep (Ovis aries), water buffalo (Bubalus bubalis), dromedary camel (Camelus dromedaries), bactrian camel (Camelus bactrianus), wild yak (Bos mutus), horse (Equus caballus), donkey (Equus asinus), reindeer (Rangifer tarandus), eurasian elk (Alces alces), alpaca (Vicugna pacos), zebu (Bos indicus), llama (Lama glama), or human (Homo sapiens).

[0131] As used herein, the term “α-S1 casein” refers to not only the α-S1 casein protein, but also fragments lacking the signal peptide, as defined above. The term fragment also includes proteins lacking up to three amino acids on the N- and/or C-terminus compared to a mature protein present in mammalian milk. α-S1 casein is found in the milk of numerous different mammalian species, including cow, goat, and sheep. The sequence, structure, and physical/chemical properties of α-S1 casein derived from various species is highly variable. An illustrative sequence for bovine α-S1 casein can be found at Uniprot Accession No. P02662, and an illustrative sequence for goat α-S1 casein can be found at GenBank Accession No. X59836.1. The terms “α-S1 casein” and “alpha-S1-casein” (and similar terms) are used interchangeably herein.

[0132] As used herein, the term “α-S2 casein” refers to not only the α-S2 casein protein, but also fragments lacking the signal peptide, as defined above. The term fragment also includes proteins lacking up to three amino acids on the N- and/or C-terminus compared to a mature protein present in mammalian milk. α-S2 is known as epsilon-casein in mouse, Gamma-casein in rat, and casein-A in guinea pig. The sequence, structure, and physical/chemical properties of α-S2 casein derived from various species is highly variable. An illustrative sequence for bovine α-S2 casein can be found at Uniprot Accession No. P02663, and an illustrative sequence for goat α-S2 casein can be found at Uniprot Accession No. P33049. The terms “α-S2 casein” and “alpha-S2-casein” (and similar terms) are used interchangeably herein.

[0133] As used herein, the term “β-casein” refers to not only the β-casein protein, but also fragments lacking the signal peptide, as defined above. The term fragment also includes proteins lacking up to three amino acids on the N- and/or C-terminus compared to a mature protein present in mammalian milk. For example, A1 and A2 β-casein are genetic variants of the β-casein milk protein that differ by one amino acid (at amino acid 67, A2 β-casein has a proline, whereas A1 has a histidine). Other genetic variants of β-casein include the A3, B, C, D, E, F, H1, H2, I and G genetic variants. The sequence, structure and physical/chemical properties of β-casein derived from various species is highly variable. Exemplary sequences for bovine β-casein can be found at Uniprot Accession No. P02666 and GenBank Accession No. M15132.1. The terms “β-casein”, “beta-casein” and “B-casein” (and similar terms) are used interchangeably herein.

[0134] As used herein, the term “κ-casein” refers to not only the κ-casein protein, but also fragments lacking the signal peptide, as defined above. The term fragment also includes proteins lacking up to three amino acids on the N- and/or C-terminus compared to a mature protein present in mammalian milk. κ-casein is cleaved by rennet, which releases a macropeptide from the C-terminal region. The remaining product with the N-terminus and approximately two-thirds of the original peptide chain is referred to as para-κ-casein. The sequence, structure and physical/chemical properties of κ-casein derived from various species is highly variable. Illustrative sequences for bovine κ-casein can be found at Uniprot Accession No. P02668 and GenBank Accession No. CAA25231. The terms “κ-casein”, “k-casein” and “kappa-casein” (and similar terms) are used interchangeably herein.

[0135] In some embodiments, the milk protein is a casein protein, for example, α-S1 casein, α-S2 casein, β-casein, and or κ-casein. In some embodiments, the milk protein is κ-casein and comprises the sequence of SEQ ID NO: 4, or a sequence at least 90%, at least 95%, at least 96%, at least 97%, at least 98%, or at least 99% identical thereto. In some embodiments, the milk protein is para-κ-casein and comprises the sequence of SEQ ID NO: 2, or a sequence at least 90%, at least 95%, at least 96%, at least 97%, at least 98%, or at least 99% identical thereto. In some embodiments, the milk protein is β-casein and comprises the sequence of SEQ ID NO: 6, or a sequence at least 90%, at least 95%, at least 96%, at least 97%, at least 98%, or at least 99% identical thereto. In some embodiments, the milk protein is α-S1 casein and comprises the sequence SEQ ID NO: 8, or a sequence at least 90%, at least 95%, at least 96%, at least 97%, at least 98%, or at least 99% identical thereto. In some embodiments, milk protein is α-S2 casein and comprises the sequence SEQ ID NO: 84, or a sequence at least 90%, at least 95%, at least 96%, at least 97%, at least 98%, or at least 99% identical thereto.

[0136] In some embodiments, the milk protein comprises a sequence that is at least 50%, at least 55%, at least 60%, at least 65%, at least 70%, at least 75%, at least 80%, at least 85%, at least 90%, at least 91%, at least 92%, at least 93%, at least 94%, at least 95%, at least 96%, at least 97%, at least 98%, or at least 99% identical to SEQ ID NO: 4. In some embodiments, the milk protein comprises a sequence that is at least 50%, at least 55%, at least 60%, at least 65%, at least 70%, at least 75%, at least 80%, at least 85%, at least 90%, at least 91%, at least 92%, at least 93%, at least 94%, at least 95%, at least 96%, at least 97%, at least 98%, or at least 99% identical to SEQ ID NO: 2. In some embodiments, the milk protein comprises a sequence that is at least 50%, at least 55%, at least 60%, at least 65%, at least 70%, at least 75%, at least 80%, at least 85%, at least 90%, at least 91%, at least 92%, at least 93%, at least 94%, at least 95%, at least 96%, at least 97%, at least 98%, or at least 99% identical to SEQ ID NO: 6. In some embodiments, the milk protein comprises a sequence that is at least 50%, at least 55%, at least 60%, at least 65%, at least 70%, at least 75%, at least 80%, at least 85%, at least 90%, at least 91%, at least 92%, at least 93%, at least 94%, at least 95%, at least 96%, at least 97%, at least 98%, or at least 99% identical to SEQ ID NO: 8. In some embodiments, the milk protein comprises a sequence that is at least 50%, at least 55%, at least 60%, at least 65%, at least 70%, at least 75%, at least 80%, at least 85%, at least 90%, at least 91%, at least 92%, at least 93%, at least 94%, at least 95%, at least 96%, at least 97%, at least 98%, or at least 99% identical to SEQ ID NO: 84.

[0137] In some embodiments, α-S1 casein is encoded by the sequence of SEQ ID NO: 7, or a sequence at least 90%, at least 95%, at least 96%, at least 97%, at least 98%, or at least 99% identical thereto. In some embodiments, α-S2 casein is encoded by the sequence of SEQ ID NO: 83, or a sequence at least 90%, at least 95%, at least 96%, at least 97%, at least 98%, or at least 99% identical thereto. In some embodiments, β-casein is encoded by the sequence of SEQ ID NO: 5, or a sequence at least 90%, at least 95%, at least 96%, at least 97%, at least 98%, or at least 99% identical thereto. In some embodiments, κ-casein is encoded by the sequence of SEQ ID NO: 3, or a sequence at least 90%, at least 95%, at least 96%, at least 97%, at least 98%, or at least 99% identical thereto. In some embodiments, para-κ-casein is encoded by the sequence of SEQ ID NO: 1, or a sequence at least 90%, at least 95%, at least 96%, at least 97%, at least 98%, or at least 99% identical thereto.

[0138] In some embodiments, the milk protein is encoded by a sequence that is at least 50%, at least 55%, at least 60%, at least 65%, at least 70%, at least 75%, at least 80%, at least 85%, at least 90%, at least 91%, at least 92%, at least 93%, at least 94%, at least 95%, at least 96%, at least 97%, at least 98%, or at least 99% identical to SEQ ID NO: 7. In some embodiments, the milk protein is encoded by a sequence that is at least 50%, at least 55%, at least 60%, at least 65%, at least 70%, at least 75%, at least 80%, at least 85%, at least 90%, at least 91%, at least 92%, at least 93%, at least 94%, at least 95%, at least 96%, at least 97%, at least 98%, or at least 99% identical to SEQ ID NO: 83. In some embodiments, the milk protein is encoded by a sequence that is at least 50%, at least 55%, at least 60%, at least 65%, at least 70%, at least 75%, at least 80%, at least 85%, at least 90%, at least 91%, at least 92%, at least 93%, at least 94%, at least 95%, at least 96%, at least 97%, at least 98%, or at least 99% identical to SEQ ID NO: 3. In some embodiments, the milk protein is encoded by a sequence that is at least 50%, at least 55%, at least 60%, at least 65%, at least 70%, at least 75%, at least 80%, at least 85%, at least 90%, at least 91%, at least 92%, at least 93%, at least 94%, at least 95%, at least 96%, at least 97%, at least 98%, or at least 99% identical to SEQ ID NO: 1. In some embodiments, the milk protein is encoded by a sequence that is at least 50%, at least 55%, at least 60%, at least 65%, at least 70%, at least 75%, at least 80%, at least 85%, at least 90%, at least 91%, at least 92%, at least 93%, at least 94%, at least 95%, at least 96%, at least 97%, at least 98%, or at least 99% identical to SEQ ID NO: 5.

[0139] In some embodiments, the milk protein is a casein protein, and comprises a sequence that is at least 50%, at least 55%, at least 60%, at least 65%, at least 70%, at least 75%, at least 80%, at least 85%, at least 90%, at least 91%, at least 92%, at least 93%, at least 94%, at least 95%, at least 96%, at least 97%, at least 98%, or at least 99% identical to any one of SEQ ID NO: 85-133, or 148-563. In some embodiments, the milk protein is a casein protein and comprises the sequence of any one of SEQ ID NO: 85-133 or 148-563.

[0140] In some embodiments, the milk protein comprises a sequence that is at least 50%, at least 55%, at least 60%, at least 65%, at least 70%, at least 75%, at least 80%, at least 85%, at least 90%, at least 91%, at least 92%, at least 93%, at least 94%, at least 95%, at least 96%, at least 97%, at least 98%, or at least 99% identical to any one of SEQ ID NO: 85-98 or 148-340. In some embodiments, the milk protein comprises the sequence of any one of SEQ ID NO: 85-98 or 148-340.

[0141] In some embodiments, the milk protein comprises a sequence that is at least 50%, at least 55%, at least 60%, at least 65%, at least 70%, at least 75%, at least 80%, at least 85%, at least 90%, at least 91%, at least 92%, at least 93%, at least 94%, at least 95%, at least 96%, at least 97%, at least 98%, or at least 99% identical to any one of SEQ ID NO: 99-109 or 341-440. In some embodiments, the milk protein comprises the sequence of any one of SEQ ID NO: 99-109 or 341-440.

[0142] In some embodiments, the milk protein comprises a sequence that is at least 50%, at least 55%, at least 60%, at least 65%, at least 70%, at least 75%, at least 80%, at least 85%, at least 90%, at least 91%, at least 92%, at least 93%, at least 94%, at least 95%, at least 96%, at least 97%, at least 98%, or at least 99% identical to any one of SEQ ID NO: 110-120 or 441-494. In some embodiments, the milk protein comprises the sequence of any one of SEQ ID NO: 110-120 or 441-494.

[0143] In some embodiments, the milk protein comprises a sequence that is at least 50%, at least 55%, at least 60%, at least 65%, at least 70%, at least 75%, at least 80%, at least 85%, at least 90%, at least 91%, at least 92%, at least 93%, at least 94%, at least 95%, at least 96%, at least 97%, at least 98%, or at least 99% identical to any one of SEQ ID NO: 121-133 or 495-563. In some embodiments, the milk protein comprises the sequence of any one of SEQ ID NO: 121-133 or 495-563 or 495-563.

[0144] In some embodiments, the milk protein is a structured protein. Examples of structured milk proteins include, for example, β-lactoglobulin, α-lactalbumin, lysozyme, lactoferrin, lactoperoxidase, serum albumin, or an immunoglobulin.

[0145] In some embodiments, the milk protein is β-lactoglobulin and comprises the sequence of SEQ ID NO: 10, or a sequence at least 90%, at least 95%, at least 96%, at least 97%, at least 98%, or at least 99% identical thereto. In some embodiments, the milk protein is β-lactoglobulin and is encoded by the sequence of any one of SEQ ID NO: 9, 11, 12, or 13, or a sequence at least 90%, at least 95%, at least 96%, at least 97%, at least 98%, or at least 99% identical to any one of SEQ ID NO: 9, 11, 12, or 13. In some embodiments, the milk protein comprises a sequence that is at least 50%, at least 55%, at least 60%, at least 65%, at least 70%, at least 75%, at least 80%, at least 85%, at least 90%, at least 91%, at least 92%, at least 93%, at least 94%, at least 95%, at least 96%, at least 97%, at least 98%, or at least 99% identical to any one of SEQ ID NO: 9-13 or 564-614. In some embodiments, the milk protein comprises the sequence of any one of SEQ ID NO: 10 or 564-614.

### Fusion Partners

[0146] The fusion proteins described herein comprise a first protein (also referred to as first fusion protein or first fusion partner) and a second protein (also referred to second fusion protein or second fusion partner), wherein at least one of the first protein and the second protein is a milk protein. Accordingly, in addition to the milk protein, the fusion proteins described herein comprise a “fusion partner” (i.e., the second protein)—a protein that is fused the milk protein in a fusion protein.

[0147] In some embodiments, fusion partner is a protein with a molecular weight of about 5 to about 100 kDa. For example, the fusion partner may have a molecular weight of at least 5 kDa, at least 10 kDa, at least 15 kDa, about 20 kDa, about 25 kDa, about 30 kDa, about 35 kDa, about 40 kDa, about 45 kDa, about 50 kDa, about 55 kDa, about 60 kDa, about 65 kDa, about 70 kDa, about 75 kDa, about 80 kDa, about 85 kDa, about 90 kDa, about 95 kDa, or about 100 kDa. In some embodiments, the fusion partner is a protein with a molecular weight of about 15 kDa, or more.

[0148] In some embodiments, fusion partner is a protein with about 10% to about 90% hydrophobic amino acids, e.g., about 10% to about 20%, about 20% to about 30%, about 30% to about 40%, about 40% to about 50%, about 50% to about 60%, about 60% to about 70%, about 70% to about 80%, or about 80% to about 90%. In some embodiments, the fusion partner may comprise at least 10%, at least 15%, at least 20%, at least 25%, at least 30%, at least 35%, at least 40%, at least 45%, at least 50%, at least 55%, at least 60%, at least 65%, at least 70%, at least 75%, at least 80%, at least 85%, or at least 90% hydrophobic amino acids. In some embodiments, the fusion partner is a protein with about 25% or more hydrophobic amino acids. In some embodiments, the fusion partner is a protein with about 30% or more hydrophobic amino acids. In some embodiments, the fusion partner is a protein with about 35% or more hydrophobic amino acids. In some embodiments, the fusion partner is a protein with about 40% or more hydrophobic amino acids. A hydrophobic amino acid is an amino acid with a hydrophobic side chain, such as alanine (A), valine (V), isoleucine (I), leucine (L), methionine (M), phenylalanine (F), tryptophan (W), tyrosine (Y), or proline.

[0149] In some embodiments, the fusion partner is a flexible protein. In general, proteins with fewer disulfide bonds are more flexible. In some embodiments, the fusion partner comprises less than about 5 disulfide bonds per 10 kDa molecular weight. In some embodiments, the fusion partner comprises less than about 4.5 disulfide bonds per 10 kDa molecular weight. In some embodiments, the fusion partner comprises less than about 4.0 disulfide bonds per 10 kDa molecular weight. In some embodiments, the fusion partner comprises less than about 3.5 disulfide bonds per 10 kDa molecular weight. In some embodiments, the fusion partner comprises less than about 3.0 disulfide bonds per 10 kDa molecular weight. In some embodiments, the fusion partner comprises less than about 2.5 disulfide bonds per 10 kDa molecular weight. In some embodiments, the fusion partner comprises less than about 2.0 disulfide bonds per 10 kDa molecular weight. In some embodiments, the fusion partner comprises less than about 1.5 disulfide bonds per 10 kDa molecular weight. In some embodiments, the fusion partner comprises less than about 1 disulfide bond per 10 kDa molecular weight. Number of disulfide bonds may be predicted using one or more computer algorithms known to those of skill in the art. For example, the software SnapGene® or the Prot Pi tool (available on the Internet by placing https://in front of www.protpi.ch/Calculator) may be useful for making such predictions. Notably, as understood by those of skill in the art, the number of cysteines in a protein, on its own, is not necessarily predictive of the number of disulfide bonds in that protein. The secondary and tertiary structure of the protein must also be considered, to determine whether a given cysteine is in appropriate proximity to another cysteine in order to form a bond.

[0150] In some embodiments, the fusion partner comprises at least one of the following characteristics: (i) a molecular weight of 15 kDa or higher, (ii) at least 30% hydrophobic amino acids, (iii) less than about 2.5 disulfide bonds per 10 kDa molecular weight. In some embodiments, the fusion partner comprises at least two of the following characteristics: (i) a molecular weight of 15 kDa or higher, (ii) at least 30% hydrophobic amino acids, (iii) less than about 2.5 disulfide bonds per 10 kDa molecular weight. In some embodiments, the fusion partner comprises all three of the following characteristics: (i) a molecular weight of 15 kDa or higher, (ii) at least 30% hydrophobic amino acids, and (iii) less than about 2.5 disulfide bonds per 10 kDa molecular weight.

[0151] In some embodiments, the fusion partner comprises at least one of the following characteristics: (i) a molecular weight of 10 kDa or higher, (ii) at least 30% hydrophobic amino acids, (iii) less than about 2.5 disulfide bonds per 10 kDa molecular weight. In some embodiments, the fusion partner comprises at least one of the following characteristics: (i) a molecular weight of 11 kDa or higher, (ii) at least 30% hydrophobic amino acids, (iii) less than about 2.5 disulfide bonds per 10 kDa molecular weight. In some embodiments, the fusion partner comprises at least one of the following characteristics: (i) a molecular weight of 12 kDa or higher, (ii) at least 30% hydrophobic amino acids, (iii) less than about 2.5 disulfide bonds per 10 kDa molecular weight. In some embodiments, the fusion partner comprises at least one of the following characteristics: (i) a molecular weight of 13 kDa or higher, (ii) at least 30% hydrophobic amino acids, (iii) less than about 2.5 disulfide bonds per 10 kDa molecular weight. In some embodiments, the fusion partner comprises at least one of the following characteristics: (i) a molecular weight of 14 kDa or higher, (ii) at least 30% hydrophobic amino acids, (iii) less than about 2.5 disulfide bonds per 10 kDa molecular weight. In some embodiments, the fusion partner comprises at least one of the following characteristics: (i) a molecular weight of 15 kDa or higher, (ii) at least 30% hydrophobic amino acids, (iii) less than about 2.5 disulfide bonds per 10 kDa molecular weight. In some embodiments, the fusion partner comprises at least one of the following characteristics: (i) a molecular weight of 16 kDa or higher, (ii) at least 30% hydrophobic amino acids, (iii) less than about 2.5 disulfide bonds per 10 kDa molecular weight. In some embodiments, the fusion partner comprises at least one of the following characteristics: (i) a molecular weight of 17 kDa or higher, (ii) at least 30% hydrophobic amino acids, (iii) less than about 2.5 disulfide bonds per 10 kDa molecular weight. In some embodiments, the fusion partner comprises at least one of the following characteristics: (i) a molecular weight of 18 kDa or higher, (ii) at least 30% hydrophobic amino acids, (iii) less than about 2.5 disulfide bonds per 10 kDa molecular weight. In some embodiments, the fusion partner comprises at least one of the following characteristics: (i) a molecular weight of 19 kDa or higher, (ii) at least 30% hydrophobic amino acids, (iii) less than about 2.5 disulfide bonds per 10 kDa molecular weight. In some embodiments, the fusion partner comprises at least one of the following characteristics: (i) a molecular weight of 20 kDa or higher, (ii) at least 30% hydrophobic amino acids, (iii) less than about 2.5 disulfide bonds per 10 kDa molecular weight. In some embodiments, the fusion partner comprises at least one of the following characteristics: (i) a molecular weight of 21 kDa or higher, (ii) at least 30% hydrophobic amino acids, (iii) less than about 2.5 disulfide bonds per 10 kDa molecular weight. In some embodiments, the fusion partner comprises at least one of the following characteristics: (i) a molecular weight of 22 kDa or higher, (ii) at least 30% hydrophobic amino acids, (iii) less than about 2.5 disulfide bonds per 10 kDa molecular weight. In some embodiments, the fusion partner comprises at least one of the following characteristics: (i) a molecular weight of 23 kDa or higher, (ii) at least 30% hydrophobic amino acids, (iii) less than about 2.5 disulfide bonds per 10 kDa molecular weight. In some embodiments, the fusion partner comprises at least one of the following characteristics: (i) a molecular weight of 24 kDa or higher, (ii) at least 30% hydrophobic amino acids, (iii) less than about 2.5 disulfide bonds per 10 kDa molecular weight. In some embodiments, the fusion partner comprises at least one of the following characteristics: (i) a molecular weight of 25 kDa or higher, (ii) at least 30% hydrophobic amino acids, (iii) less than about 2.5 disulfide bonds per 10 kDa molecular weight.

[0152] In some embodiments, the fusion partner comprises a molecular weight of 15 kDa or higher and at least 30% hydrophobic amino acids. In some embodiments, the fusion partner comprises a molecular weight of 15 kDa or higher and less than about 2.5 disulfide bonds per 10 kDa molecular weight. In some embodiments, the fusion partner comprises at least 30% hydrophobic amino acids and less than about 2.5 disulfide bonds per 10 kDa molecular weight.

[0153] In some embodiments, the fusion partner is kappa-casein. In some embodiments, the fusion partner is beta-casein. In some embodiments, the fusion partner is alpha-casein. In some embodiments, the fusion partner is beta-lactoglobulin. In some embodiments, the fusion partner is green fluorescent protein. In some embodiments the fusion partner is lysozyme. In some embodiments, fusion partner is 2S globulin. In some embodiments, the fusion partner is oleosin A. In some embodiments, the fusion partner is oleosin B. In some embodiments, the fusion partner is the Kunitz-Trypsin inhibitor. In some embodiments the fusion partner is the Bowman-Birk inhibitor. In some embodiments, the fusion partner is Hydrophobin II.

### Non-Milk Proteins

[0154] In some embodiments, the fusion partner is a non-milk protein. Accordingly, in some embodiments, the fusion proteins described herein may comprise one or more non-milk proteins, including any fragment or variant thereof. As used herein, the term “non-milk protein” refers to any protein that is not typically present in any mammalian milk composition. In some embodiments, the fusion proteins described herein may comprise a first protein and a second protein, wherein the first protein is a milk protein and the second protein (i.e., the fusion partner) is a non-milk protein. The non-milk protein may be, for example, an animal protein or a plant protein. In some embodiments, the animal protein is a mammalian protein. In some embodiments, the animal protein is an avian protein. The non-milk proteins described herein may be classified as structured or unstructured. In some embodiments, the non-milk protein is a structured protein. In some embodiment, the non-milk protein is an unstructured protein.

[0155] Whether a protein is structured may be determined using a variety of biophysical and biochemical methods known in the art, such as small angle X-ray scattering, Raman optical activity, circular dichroism, and protease sensitivity. In some embodiments, a protein is considered to be structured if it has been crystallized or if it may be crystallized using standard techniques.

[0156] In some embodiments, the non-milk protein is a protein that is typically used as a marker. As used herein, the term “marker” refers to a protein that produces a visual or other signal and is used to detect successful delivery of a vector (e.g., a DNA sequence) into a cell. Proteins typically used as a marker may include, for example, fluorescent proteins (e.g., green fluorescent protein (GFP)). Other examples include yellow fluorescent protein (YFP), orange fluorescent protein, blue fluorescent protein (BFP), cyan fluorescent protein (CFP), or red fluorescent protein (RFP). Non-limiting examples of proteins within these color classes are shown below in Table 2 (See also, Schaner, N. et al., A guide to choosing fluorescent proteins, 2005, Nature, 2:12, 905-909).

TABLE 2
Examples of fluorescent proteins

| Color class | Protein |
|---|---|
| Far-red | mPlum |
| Red | mCherry |
| | tdTomato |
| | mStrawberry |
| | J-Red |
| | DsRed-monomer |
| Orange | mOrange |
| | mKO |
| Yellow-green | mCitrine |
| | Venus |
| | YPet |
| | EYFP |
| Green | Emerald |
| | EGFP |
| | GFP |
| Cyan | CyPet |
| | mCFPm |
| | Cerulean |
| UV-excitable green | T-Sapphire |

[0157] Other examples of marker proteins include, but are not limited to, bacterial or other enzymes (e.g., β-glucuronidase (GUS), β-galactosidase, luciferase, chloramphenicol acetyltransferase).

[0158] Additional non-limiting examples of non-milk proteins that may be used in the fusion proteins described herein are provided in Table 3. In some embodiments, a fragment or variant of any one of the proteins listed in Table 3 may be used.

TABLE 3
Non-milk proteins for use as fusion partners

| | Protein or | | Exemplary |
|---|---|---|---|
| | Protein | | Uniprot |
| Categories | family | Native Species | Accession No. |
| Mammalian | Collagen | Human (Homo sapiens) | Q02388, |
| | family | | P02452, |
| | | | P08123, |
| | | | P02458 |
| | Hemoglobin | Bovine (Bos taurus) | P02070 |
| Avian | Ovalbumin | Chicken (Gallus gallus) | P01012 |
| proteins | Ovotransferrin | Chicken (Gallus gallus) | P02789 |
| | Ovoglobulin | Chicken (Gallus gallus) | I0J170 |
| | Lysozyme | Chicken (Gallus gallus) | P00698 |
| Plant | Oleosins | Soybean (Glycine max) | P29530, |
| Proteins | | | P29531 |
| | Leghemoglobin | Soybean (Glycine max) | Q41219 |
| | Extensin-like | Soybean (Glycine soja) | A0A445JU93 |
| | protein family | | |
| | Prolamin | Rice (Oryza sativa) | Q0DJ45 |
| | Glutenin | Wheat (Sorghum bicolor) | P10388 |
| | Gamma-kafirin | Wheat (Sorghum bicolor) | Q41506 |
| | preprotein | | |
| | Alpha globulin | Rice (Oryza sativa) | P29835 |
| | Basic 7S | Soybean (Glycine max) | P13917 |
| | globulin | | |
| | precursor | | |
| | 2S albumin | Soybean (Glycine max) | P19594 |
| | Beta- | Soybean (Glycine max) | P0DO16, |
| | conglycinins | | P0DO15, |
| | | | P0DO15 |
| | Glycinins | Soybean (Glycine max) | P04347, |
| | | | P04776, |
| | | | P04405 |
| | Canein | Sugar cane (Saccharum | ABP64791.1 |
| | | officinarum) | |
| | Zein | Corn (Zea Mays) | ABP64791.1 |
| | Patatin | Tomato (Solanum | P07745 |
| | | lycopersicum) | |
| | Kunitz-Trypsin | Soybean (Glycine max) | Q39898 |
| | inhibitor | | |
| | Bowman-Birk | Soybean (Glycine max) | I1MQD2 |
| | inhibitor | | |
| | Cystatine | Tomato (Solanum | Q9SE07 |
| | | lycopersicum) | |
| Fungal | Hydrophobin I | Fungus (Trichoderma | P52754 |
| proteins | | reesei) | |
| | Hydrophobin II | Fungus (Trichoderma | P79073 |
| | | reesei) | |

[0159] In some embodiments, the non-milk protein may be an animal protein. For example, in some embodiments, the non-milk protein may be a mammalian protein. The mammalian protein may be, for example, hemoglobin or collagen. In some embodiments, the non-milk protein is an avian protein, such as ovalbumin, ovotransferrin, lysozyme or ovoglobulin.

[0160] In some embodiments, the non-milk protein is a plant protein. In some embodiments, the non-milk protein is a protein that is typically expressed in a seed. In some embodiments, the plant protein is a protein that is not typically expressed in a seed. In some embodiments, the plant protein is a storage protein, e.g., a protein that acts as a storage reserve for nitrogen, carbon, and/or sulfur. In some embodiments, the plant protein may inhibit one or more proteases. In some embodiments, the non-milk protein is a plant protein selected from: oleosins, leghemoglobin, extension-like protein family, prolamin, glutenin, gamma-kafirin preprotein, α-globulin, basic 7S globulin precursor, 2S albumin, β-conglycinins, glycinins, canein, zein, patatin, kunitz-trypsin inhibitor, bowman-birk inhibitor, and cystatine. Illustrative plant proteins that may be used to inhibit one or more proteases are shown below in Table 4. In some embodiments, the non-milk protein comprises the sequence of any one of SEQ ID NO: 840, 842, 844, 846, 848 or 850. In some embodiments, the non-milk protein comprises a sequence having at least 85%, at least 90%, at least 91%, at least 92%, at least 93%, at least 94%, at least 95%, at least 96%, at least 97%, at least 98%, or at least 99% identity to any one of SEQ ID NO: 840, 842, 844, 846, 848 or 850. In some embodiments, the non-milk protein comprises a sequence having the sequence ofany one of SEQ ID NO: 840, 842, 844, 846, 848 or 850 plus at least 1, at least 2, at least 3, at least 4, at least 5, at least 6, at least 7, at least 8, at least 9, at least 10, at least 11, at least 12, at least 13, at least 14, at least 15, or more amino acid substitutions.

TABLE 4
Proteins capable of inhibiting plant proteases

| | | | DNA | Protein |
|---|---|---|---|---|
| | Short | Accession No. | Sequence | Sequence |
| Protein Name | Name | (Uniprot) | (SEQ ID) | (SEQ ID) |
| Bowman-Birk | GmBBID- | Glyma16g33400 | 839 | 840 |
| serine protease | II | | | |
| inhibitor D-II | | | | |
| Bowman-Birk | GMBBI- | Glyma14g26410 | 841 | 842 |
| serine protease | A1 | | | |
| inhibitor A1 | | | | |
| Kunitz-type | GmKTi1 | Glyma01g10900 | 843 | 844 |
| trypsin inhibitor | | | | |
| gene 1 | | | | |
| Kunitz-type | GmKTi2 | AAB23483 | 845 | 846 |
| trypsin inhibitor | | | | |
| gene 2 | | | | |
| Kunitz-type | GmKTi3 | Glyma08g45531 | 847 | 848 |
| trypsin inhibitor | | | | |
| gene 3 | | | | |
| Cystatine | SICYS8 | | 849 | 850 |
| proteinase | | | | |
| inhibitor | | | | |
| (Cystatin) | | | | |

[0161] In some embodiments, the structured protein is a fungal protein. For example, the fungal protein may be selected from hydrophobin I and hydrophobin II.

### Fusion Proteins

[0162] Described herein are fusion proteins comprising at least first protein and a second protein. In some embodiments, at least one of the first protein and the second protein is a milk protein. In some embodiments, a fusion protein comprises at least two proteins, such as three, four, five, six, seven, eight, nine, or ten proteins, or more. In some embodiments, the proteins in the fusion proteins are linked via a linker. In some embodiments, the fusion proteins comprise one or more protease cleavage sites, such as one or more chymosin cleavage sites. Various illustrative embodiments of the fusion proteins of the disclosure are described in further detail below.

### Fusion Protein Comprising a Milk Protein and a Non-Milk Protein

[0163] In some embodiments, a fusion protein comprises at least first protein and a second protein, wherein at least one of the first protein and the second protein is a milk protein, and at least one of the first protein and the second protein is a non-milk protein. In some embodiments, a fusion protein comprises at least two proteins, such as three, four, five, six, seven, eight, nine, or ten proteins, or more.

[0164] In some embodiments, the first protein is a milk protein, and the second protein is a non-milk protein. In some embodiments, the non-milk protein is an avian protein. For example, the non-milk protein may be an avian protein selected from: ovalbumin, ovotransferrin, and ovoglobulin. In some embodiments, the non-milk protein is a protein capable of inhibiting one or more proteases, such as the proteins shown above in Table 4, or variants thereof.

[0165] In some embodiments, the fusion protein comprises α-S1 casein, or fragment thereof, and ovalbumin. In some embodiments, the fusion protein comprises α-S2 casein, or fragment thereof, and ovalbumin. In some embodiments, the fusion protein comprises β-casein, or fragment thereof, and ovalbumin. In some embodiments, the fusion protein comprises κ-casein, or fragment thereof, and ovalbumin. In some embodiments, the recombinant fusion protein comprises para-κ-casein, or fragment thereof, and ovalbumin.

[0166] In some embodiments, the fusion protein comprises α-S1 casein, or fragment thereof; and ovotransferrin. In some embodiments, the fusion protein comprises α-S2 casein, or fragment thereof; and ovotransferrin. In some embodiments, the fusion protein comprises (3-casein, or fragment thereof; and ovotransferrin. In some embodiments, the fusion protein comprises κ-casein, or fragment thereof; and ovotransferrin. In some embodiments, the fusion protein comprises para-κ-casein, or fragment thereof; and ovotransferrin.

[0167] In some embodiments, the fusion protein comprises α-S1 casein, or fragment thereof; and ovoglobulin. In some embodiments, the fusion protein comprises α-S2 casein, or fragment thereof; and ovoglobulin. In some embodiments, the fusion protein comprises β-casein, or fragment thereof; and ovoglobulin. In some embodiments, the fusion protein comprises κ-casein, or fragment thereof; and ovoglobulin. In some embodiments, the fusion protein comprises para-κ-casein, or fragment thereof; and ovoglobulin.

[0168] In some embodiments, the fusion protein comprises a non-milk protein that functions as a marker, such as green fluorescent protein (GFP). In some embodiments, the fusion protein comprises α-S1-casein, or fragment thereof; and GFP. In some embodiments, the fusion protein comprises α-S2-casein, or fragment thereof, and GFP. In some embodiments, the fusion protein comprises β-casein, or fragment thereof; and GFP. In some embodiments, the fusion protein comprises κ-casein, or fragment thereof, and GFP. In some embodiments, the fusion protein comprises para-κ-casein, or fragment thereof; and GFP.

[0169] In some embodiments, the fusion protein comprises a non-milk protein that is a plant protein. In some embodiments, the fusion protein comprises α-S1 casein, or fragment thereof; and a plant protein selected from the group consisting of hydrophobin I, hydrophobin II, oleosins, leghemoglobin, extension-like protein family, prolamin, glutenin, gamma-kafirin preprotein, α-globulin, basic 7S globulin precursor, 2S albumin, β-conglycinins, glycinins, canein, zein, patatin, kunitz-trypsin inhibitor, bowman-birk inhibitor, and cystatine.

[0170] In some embodiments, the fusion protein comprises α-S2-casein, or fragment thereof; and a plant protein selected from the group consisting of hydrophobin I, hydrophobin II, oleosins, leghemoglobin, extension-like protein family, prolamin, glutenin, gamma-kafirin preprotein, α-globulin, basic 7S globulin precursor, 2S albumin, β-conglycinins, glycinins, canein, zein, patatin, kunitz-trypsin inhibitor, bowman-birk inhibitor, and cystatine.

[0171] In some embodiments, the fusion protein comprises β-casein, or fragment thereof; and a plant protein selected from the group consisting of hydrophobin I, hydrophobin II, oleosins, leghemoglobin, extension-like protein family, prolamin, glutenin, gamma-kafirin preprotein, α-globulin, basic 7S globulin precursor, 2S albumin, β-conglycinins, glycinins, canein, zein, patatin, kunitz-trypsin inhibitor, bowman-birk inhibitor, and cystatine.

[0172] In some embodiments, the fusion protein comprises κ-casein, or fragment thereof; and a plant protein selected from the group consisting of hydrophobin I, hydrophobin II, oleosins, leghemoglobin, extension-like protein family, prolamin, glutenin, gamma-kafirin preprotein, α-globulin, basic 7S globulin precursor, 2S albumin, β-conglycinins, glycinins, canein, zein, patatin, kunitz-trypsin inhibitor, bowman-birk inhibitor, and cystatine.

[0173] In some embodiments, the fusion protein comprises para-κ-casein, or fragment thereof; and a plant protein selected from the group consisting of hydrophobin I, hydrophobin II, oleosins, leghemoglobin, extension-like protein family, prolamin, glutenin, gamma-kafirin preprotein, α-globulin, basic 7S globulin precursor, 2S albumin, β-conglycinins, glycinins, canein, zein, patatin, kunitz-trypsin inhibitor, bowman-birk inhibitor, and cystatine.

[0174] In some embodiments, the fusion protein comprises γ-zein and β-casein, in that respective configuration.

### Fusion Proteins Comprising a Milk Protein and an Animal (e.g., Mammalian) Protein

[0175] In some embodiments, the fusion proteins described herein comprise (i) a milk protein (which may be unstructured or structured), and (ii) an animal protein. In some embodiments, the fusion proteins described herein comprise (i) an unstructured milk protein, and (ii) a mammalian protein. In some embodiments, the fusion proteins described herein comprise (i) an unstructured milk protein, and (ii) an avian protein. In some embodiments, the fusion proteins described herein comprise (i) an unstructured milk protein, and (ii) a fungal protein.

[0176] In some embodiments, the fusion proteins comprise a milk protein, such as a casein protein. In some embodiments, the fusion protein comprises a milk protein selected from α-S1 casein, α-S2 casein, β-casein, and κ-casein. In some embodiments, the fusion protein comprises a milk protein isolated or derived from cow (Bos taurus), goat (Capra hircus), sheep (Ovis aries), water buffalo (Bubalus bubalis), dromedary camel (Camelus dromedaries), bactrian camel (Camelus bactrianus), wild yak (Bos mutus), horse (Equus caballus), donkey (Equus asinus), reindeer (Rangifer tarandus), eurasian elk (Alces alces), alpaca (Vicugna pacos), zebu (Bos indicus), llama (Lama glama), or human (Homo sapiens). In some embodiments, the fusion protein comprises a casein protein (e.g., α-S1 casein, α-S2 casein, β-casein, para-κ-casein or κ-casein) from cow (Bos taurus), goat (Capra hircus), sheep (Ovis aries), water buffalo (Bubalus bubalis), dromedary camel (Camelus dromedaries), bactrian camel (Camelus bactrianus), wild yak (Bos mutus), horse (Equus caballus), donkey (Equus asinus), reindeer (Rangifer tarandus), eurasian elk (Alces alces), alpaca (Vicugna pacos), zebu (Bos indicus), llama (Lama glama), or human (Homo sapiens).

[0177] In some embodiments, the fusion protein comprises a milk protein found in Table 34. In some embodiments, the fusion protein comprises a milk protein that is a variant of a protein found in Table 34. In some embodiments, the fusion protein comprises a casein protein as found in Table 34 and/or a variant thereof. In some embodiments, the fusion protein comprises a beta-lactoglobulin as found in Table 34 and/or a variant thereof. One of skill in the art would be able to utilize the numerous milk proteins taught in Table 34, along with their associated SEQ ID NO and/or accession number and find such other milk proteins as encompassed by the disclosure.

[0178] In some embodiments, the fusion protein comprises a milk protein that shares at least 50%, at least 55%, at least 60%, at least 65%, at least 70%, at least 75%, at least 80%, at least 85%, at least 90%, at least 95%, or at least 100% sequence identity to a protein in Table 34 and/or a variant thereof. In some embodiments, the fusion protein comprises a milk protein that shares at least from about 70% to about 100% sequence identity to a protein in Table 34 and/or a variant thereof. In some embodiments, the fusion protein comprises a milk protein that shares at least from about 80% to about 100% sequence identity to a protein in Table 34 and/or a variant thereof. In some embodiments, the fusion protein comprises a milk protein that shares at least from about 90% to about 100% sequence identity to a protein in Table 34 and/or a variant thereof. In some embodiments, the fusion protein comprises a milk protein that shares at least 50%, 55%, 60%, 65%, 70%, 75%, 80%, 85%, 90%, 95%, or 100% sequence identity with any one of SEQ ID NO: 148-614. In some embodiments, the fusion protein comprises a milk protein that comprises a sequence of any one of SEQ ID NO: 148-614.

[0179] In some embodiments, the fusion protein is α-S1 casein. In some embodiments, the α-S1 casein comprises the sequence SEQ ID NO: 8, or a sequence at least 70%, 80%, 90%, at least 95%, at least 96%, at least 97%, at least 98%, or at least 99% identical thereto. In some embodiments, the α-S1 casein comprises the sequence of any one of SEQ ID NO: 99-109, or a sequence at least 90%, at least 95%, at least 96%, at least 97%, at least 98%, or at least 99% identical thereto.

[0180] In some embodiments, the fusion protein comprises α-S2 casein. In some embodiments, the α-S2 casein comprises the sequence SEQ ID NO: 84, or a sequence at least 70%, 80%, 90%, at least 95%, at least 96%, at least 97%, at least 98%, or at least 99% identical thereto. In some embodiments, the α-S2 casein comprises the sequence of any one of SEQ ID NO: 110-120, or a sequence at least 90%, at least 95%, at least 96%, at least 97%, at least 98%, or at least 99% identical thereto.

[0181] In some embodiments, the fusion protein comprises β-casein. In some embodiments, the β-casein comprises the sequence of SEQ ID NO: 6, or a sequence at least 70%, 80%, 90%, at least 95%, at least 96%, at least 97%, at least 98%, or at least 99% identical thereto. In some embodiments, the β-casein comprises the sequence of any one of SEQ ID NO: 121-133, or a sequence at least 90%, at least 95%, at least 96%, at least 97%, at least 98%, or at least 99% identical thereto.

[0182] In some embodiments, the fusion protein comprises κ-casein. In some embodiments, the κ-casein comprises the sequence of SEQ ID NO: 4, or a sequence at least 70%, 80%, 90%, at least 95%, at least 96%, at least 97%, at least 98%, or at least 99% identical thereto. In some embodiments, the κ-casein comprises the sequence of any one of SEQ ID NO: 85-98, or a sequence at least 90%, at least 95%, at least 96%, at least 97%, at least 98%, or at least 99% identical thereto.

[0183] In some embodiments, the fusion protein comprises para-κ-casein. In some embodiments, the para-κ-casein comprises the sequence of SEQ ID NO: 2, or a sequence at least 70%, 80%, 90%, at least 95%, at least 96%, at least 97%, at least 98%, or at least 99% identical thereto.

[0184] In some embodiments, the fusion protein comprises β-lactoglobulin, α-lactalbumin, albumin, lysozyme, lactoferrin, lactoperoxidase, or an immunoglobulin (e.g., IgA, IgG, IgM, or IgE).

[0185] In some embodiments, the fusion protein comprises β-lactoglobulin. In some embodiments, the β-lactoglobulin comprises the sequence of SEQ ID NO: 10, or a sequence at least 70%, 80%, 90%, at least 95%, at least 96%, at least 97%, at least 98%, or at least 99% identical thereto.

[0186] In some embodiments, the fusion protein comprises a mammalian protein selected from hemoglobin and collagen. In some embodiments, the fusion protein comprises an avian protein selected from ovalbumin, ovotransferrin, lysozyme and ovoglobulin.

[0187] In some embodiments, a fusion protein comprises a casein protein (e.g., κ-casein, para-κ-casein, β-casein, or α-S1 casein) and β-lactoglobulin. In some embodiments, a fusion protein comprises κ-casein and β-lactoglobulin (see, e.g., FIG. 4, FIG. 9, FIG. 12A-12B). In some embodiments, a fusion protein comprises para-κ-casein and β-lactoglobulin (see, e.g., FIG. 7, FIG. 8, FIG. 12A-12B). In some embodiments, a fusion protein comprises β-casein and β-lactoglobulin. In some embodiments, a fusion protein comprises α-S1 casein and β-lactoglobulin.

[0188] In some embodiments, a plant-expressed recombinant fusion protein comprises κ-casein, or fragment thereof; and β-lactoglobulin, or fragment thereof. In some embodiments, the fusion protein comprises, in order from N-terminus to C-terminus, the κ-casein and the β-lactoglobulin.

[0189] In some embodiments, a plant-expressed recombinant fusion protein comprises β-casein, or fragment thereof; and β-lactoglobulin, or fragment thereof. In some embodiments, the fusion protein comprises, in order from N-terminus to C-terminus, the β-casein and the β-lactoglobulin.

[0190] In some embodiments, a fusion protein comprises β-casein, α-S1 casein, α-S1 casein, and β-casein, in that respective configuration. In some embodiments, a fusion protein comprises β-casein, β-casein, κ-casein, and β-lactoglobulin, in that respective configuration. In some embodiments, a fusion protein comprises β-casein, β-casein, β-casein, β-casein, in that respective configuration.

### Fusion Proteins Comprising a Milk Protein and a Plant Protein

[0191] In some embodiments, the fusion proteins described herein comprise (i) a milk protein (which may be unstructured or structured), and (ii) a plant protein. In some embodiments, the milk protein is a casein protein, such as α-S1 casein, α-S2 casein, β-casein, or κ-casein. In some embodiments, the milk protein is β-lactoglobulin, α-lactalbumin, albumin, lysozyme, lactoferrin, lactoperoxidase, or an immunoglobulin (e.g., IgA, IgG, IgM, or IgE). In some embodiments, the plant protein is selected from the group consisting of: hydrophobin I, hydrophobin II, oleosins, leghemoglobin, extension-like protein family, prolamin, glutenin, gamma-kafirin preprotein, α-globulin, basic 7S globulin precursor, 2S albumin, 0-conglycinins, glycinins, canein, zein, patatin, kunitz-trypsin inhibitor, bowman-birk inhibitor, and cystatine. In some embodiments, the plant protein is a protein that is capable of forming a protein body (PB), such as a prolamin. In some embodiments, the protein that is capable of forming a protein body comprises one or more repeat sequences, such as a repeat sequence selected from PPPPVHL (SEQ ID NO: 828); PPPPVXS, wherein X=S, Y, Q, or F (SEQ ID NO: 829); PPPV (SEQ ID NO: 830); PPVHX, wherein X=S or F (SEQ ID NO: 831); PPPVHS (SEQ ID NO: 832); PPPVXS, wherein X=Y, H, or F (SEQ ID NO: 833); PPPVXL, wherein X=H, or D (SEQ ID NO: 834); PPPVHL (SEQ ID NO: 835); PPPPPVYS (SEQ ID NO: 836); PPPPVHS (SEQ ID NO: 837); and PPPVHL (SEQ ID NO: 838). In some embodiments, the repeat sequence repeats at least 2, at least 3, at least 4, at least 5, at least 6, at least 7, at least 8, at least 9 or at least 10 times.

### Fusion Protein Comprising a Milk Protein and Prolamin

[0192] In some embodiments, the fusion protein comprises a prolamin protein, or a fragment or derivative thereof. Prolamins are a group of plant storage proteins having a high proline and glutamine amino acid content and have poor solubility in water. They are found in plants, mainly in the seeds of cereal grants such as wheat (e.g., the gliadin class of proteins), barley (e.g., the hordein class of proteins), rye (e.g., the secalin class of proteins), corn (e.g., the zein class of proteins), sorghum (e.g., the kafirin class of proteins), and oats (e.g., the avenin class of proteins).

[0193] In some embodiments, a fusion protein comprises a canein, such as a gamma canein. For example, the canein may be a 27 kD gamma canein (gCan27), or a fragment or derivative thereof gCan27 is a zein-like protein, known to be resident in the endoplasmic reticulum. An illustrative sequence for gCAN27 from sugar cane (Saccharum officinarum) can be found at Uniprot Ref. No. ABP64791.1 (SEQ ID NO: 800).

[0194] In some embodiments, the fusion protein comprises a canein, wherein the canein has the sequence of SEQ ID NO: 800, or a sequence at least 80%, at least 85%, at least 90%, at least 91%, at least 92%, at least 93%, at least 94%, at least 95%, at least 96%, at least 97%, at least 98%, or at least 99% identical thereto. In some embodiments, the fusion protein comprises a canein, wherein the canein has the sequence of SEQ ID NO: 800 with 1-5, 5-10, 10-20, 20-30, or 30-50 amino acid substitutions relative thereto. In some embodiments, the fusion protein comprises a canein, wherein the canein has a sequence corresponding to amino acids 42-237 of SEQ ID NO: 800, or a sequence at least 80%, at least 85%, at least 90%, at least 91%, at least 92%, at least 93%, at least 94%, at least 95%, at least 96%, at least 97%, at least 98%, or at least 99% identical thereto. In some embodiments, the fusion protein comprises a canein, wherein the canein has a sequence corresponding to amino acids 42-237 of SEQ ID NO: 800 with 1-5, 5-10, 10-20, 20-30, or 30-50 amino acid substitutions relative thereto. In some embodiments, the fusion protein comprises a canein, wherein the canein has the sequence of SEQ ID NO: 805, or a sequence at least 80%, at least 85%, at least 90%, at least 91%, at least 92%, at least 93%, at least 94%, at least 95%, at least 96%, at least 97%, at least 98%, or at least 99% identical thereto. In some embodiments, the fusion protein comprises a canein, wherein the canein has the sequence of SEQ ID NO: 805 with 1-5, 5-10, 10-20, 20-30, or 30-50 amino acid substitutions relative thereto. In some embodiments, the canein is encoded by the DNA sequence of SEQ ID NO: 804.

[0195] In some embodiments, the fusion protein comprises a milk protein and canein, or a fragment thereof. In some embodiments, the fusion protein comprises a casein protein and canein, or a fragment thereof. In some embodiments, the fusion protein comprises α-S1 casein and canein. In some embodiments, the fusion protein comprises α-S2-casein and canein. In some embodiments, the fusion protein comprises β-casein and canein. In some embodiments, the fusion protein comprises κ-casein and canein. In some embodiments, the fusion protein comprises para-κ-casein and canein. In some embodiments, the fusion protein comprises β-lactoglobulin and canein. In some embodiments, the fusion protein comprises the sequence of SEQ ID NO: 803, or a sequence at least 80%, at least 85%, at least 90%, at least 91%, at least 92%, at least 93%, at least 94%, at least 95%, at least 96%, at least 97%, at least 98%, or at least 99% identical thereto. In some embodiments, the fusion protein comprises the sequence of SEQ ID NO: 803, or a sequence with 1-5, 5-10, 10-20, 20-30, or 30-50 amino acid substitutions relative thereto. In some embodiments, the fusion protein is encoded by the DNA sequence of SEQ ID NO: 802.

[0196] In some embodiments, the fusion protein comprises a zein, such as gamma zein (γZein or glutenin 2). Zein is a storage protein of the prolamin class. It is found in the seeds of cereal plants and is able to accumulate within the endoplasmic reticulum (ER). In maize, for example, there are our classes of zeins (α, β, δ, γ). During endosperm development, γ- and (3-zeins are synthesized first, forming a polymer termed protein bodies (PBs) where α- and 6-zein will later accumulate (Mainieri et al, 2018). Proteins in the ER lumen usually have a tetrapeptide at the C terminus (KDEL or variations), which is necessary and sufficient for ER localization; however, zeins do not have this signal. The interactions that retain zeins in the ER are not well understood, but γ-zein is able to form ER-located PBs when expressed in storage (Coleman et al., 1996) or vegetative (Geli et al., 1994, Torrent et al., 2009, Marques et al 2020) tissues of transgenic plants in the absence of its partner zein subunits, indicating that no tissue-specific helper factors are required.

[0197] The γ-zein sequence (including the 27 kDa form of the protein) contains a signal peptide for translocation to the ER (co-translationally removed) followed by a region containing eight repeats of the hexapeptide PPPVHL (SEQ ID NO: 812), the prox domain and seven Cys residues involved in inter-chain bonds that make the protein insoluble in non-reducing conditions, and finally a second region (C-term) homologous to 2S albumins, which are vacuolar storage proteins present in various amounts in all land plants.

[0198] An illustrative sequence for γ-zein from corn (Zea mays) can be found at Uniprot Ref. No. P04706 (SEQ ID NO: 801). In some embodiments, the fusion protein comprises γ-zein, wherein the γ-zein has the sequence of SEQ ID NO: 801, or a sequence at least 80%, at least 85%, at least 90%, at least 91%, at least 92%, at least 93%, at least 94%, at least 95%, at least 96%, at least 97%, at least 98%, or at least 99% identical thereto. In some embodiments, the fusion protein comprises a γ-zein, wherein for γ-zein has the sequence of SEQ ID NO: 801 with 1-5, 5-10, 10-20, 20-30, or 30-50 amino acid substitutions relative thereto. In some embodiments, the fusion protein comprises γ-zein, wherein the γ-zein has a sequence corresponding to amino acids 17-112 of SEQ ID NO: 801, or a sequence at least 80%, at least 85%, at least 90%, at least 91%, at least 92%, at least 93%, at least 94%, at least 95%, at least 96%, at least 97%, at least 98%, or at least 99% identical thereto. In some embodiments, the fusion protein comprises γ-zein, wherein the γ-zein has a sequence corresponding to amino acids 17-112 of SEQ ID NO: 801 with 1-5, 5-10, 10-20, 20-30, or 30-50 amino acid substitutions relative thereto. In some embodiments, the fusion protein comprises a γ-zein, wherein the γ-zein has a sequence corresponding to amino acids 20-223 of SEQ ID NO: 801, or a sequence at least 80%, at least 85%, at least 90%, at least 91%, at least 92%, at least 93%, at least 94%, at least 95%, at least 96%, at least 97%, at least 98%, or at least 99% identical thereto. In some embodiments, the fusion protein comprises a γ-zein, wherein the γ-zein has a sequence corresponding to amino acids 20-223 of SEQ ID NO: 801 with 1-5, 5-10, 10-20, 20-30, or 30-50 amino acid substitutions relative thereto. In some embodiments, the fusion protein comprises a γ-zein, wherein the γ-zein has the sequence of SEQ ID NO: 809, or a sequence at least 80%, at least 85%, at least 90%, at least 91%, at least 92%, at least 93%, at least 94%, at least 95%, at least 96%, at least 97%, at least 98%, or at least 99% identical thereto. In some embodiments, the fusion protein comprises a γ-zein, wherein the γ-zein has the sequence of SEQ ID NO: 809 with 1-5, 5-10, 10-20, 20-30, or 30-50 amino acid substitutions relative thereto. In some embodiments, the γ-zein is encoded by the DNA sequence of SEQ ID NO: 808. In some embodiments, the fusion protein comprises a γ-zein, wherein the γ-zein has the sequence of SEQ ID NO: 811, or a sequence at least 80%, at least 85%, at least 90%, at least 91%, at least 92%, at least 93%, at least 94%, at least 95%, at least 96%, at least 97%, at least 98%, or at least 99% identical thereto. In some embodiments, the fusion protein comprises a γ-zein, wherein the γ-zein has the sequence of SEQ ID NO: 811 with 1-5, 5-10, 10-20, 20-30, or 30-50 amino acid substitutions relative thereto. In some embodiments, the γ-zein is encoded by the DNA sequence of SEQ ID NO: 810.

[0199] In some embodiments, the fusion protein comprises a milk protein and γ-zein, or a fragment thereof. In some embodiments, the fusion protein comprises a casein protein and γ-zein, or a fragment thereof. In some embodiments, the fusion protein comprises α-S1 casein and γ-zein. In some embodiments, the fusion protein comprises α-S2-casein and γ-zein. In some embodiments, the fusion protein comprises β-casein and γ-zein. In some embodiments, the fusion protein comprises κ-casein and γ-zein. In some embodiments, the fusion protein comprises para-κ-casein and γ-zein. In some embodiments, the fusion protein comprises β-lactoglobulin and γ-zein. In some embodiments, the fusion protein comprises the sequence of SEQ ID NO: 807, or a sequence at least 80%, at least 85%, at least 90%, at least 91%, at least 92%, at least 93%, at least 94%, at least 95%, at least 96%, at least 97%, at least 98%, or at least 99% identical thereto. In some embodiments, the fusion protein comprises the sequence of SEQ ID NO: 807, or a sequence with 1-5, 5-10, 10-20, 20-30, or 30-50 amino acid substitutions relative thereto. In some embodiments, the fusion protein is encoded by the DNA sequence of SEQ ID NO: 806.

### Fusion Protein Comprising Two or More Milk Proteins

[0200] In some embodiments, the fusion proteins described herein comprise at least first protein and a second protein, wherein the first protein and/or second protein is a milk protein. In some embodiments, the first protein and the second protein are milk proteins. In some embodiments, each of the first protein and the second protein are independently selected from α-S1 casein, α-S2 casein, β-casein, κ-casein, para-κ-casein, β-lactoglobulin, α-lactalbumin, lysozyme, lactoferrin, lactoperoxidase, serum albumin, and immunoglobulins.

[0201] In some embodiments, the recombinant fusion protein comprises α-S1 casein, or fragment thereof; and β-lactoglobulin. In some embodiments, the recombinant fusion protein comprises α-S2 casein, or fragment thereof; and β-lactoglobulin. In some embodiments, the recombinant fusion protein comprises β-casein, or fragment thereof; and β-lactoglobulin. In some embodiments, the recombinant fusion protein comprises κ-casein, or fragment thereof; and β-lactoglobulin. In some embodiments, the recombinant fusion protein comprises para-κ-casein, or fragment thereof; and β-lactoglobulin.

[0202] In some embodiments, the recombinant fusion protein comprises α-S1 casein, or fragment thereof; and α-lactalbumin. In some embodiments, the recombinant fusion protein comprises α-S2 casein, or fragment thereof; and α-lactalbumin. In some embodiments, the recombinant fusion protein comprises β-casein, or fragment thereof; and α-lactalbumin. In some embodiments, the recombinant fusion protein comprises κ-casein, or fragment thereof; and α-lactalbumin. In some embodiments, the recombinant fusion protein comprises para-κ-casein, or fragment thereof; and β-lactalbumin.

[0203] In some embodiments, the recombinant fusion protein comprises α-S1 casein, or fragment thereof, and lysozyme. In some embodiments, the recombinant fusion protein comprises α-S2 casein, or fragment thereof, and lysozyme. In some embodiments, the recombinant fusion protein comprises β-casein, or fragment thereof, and lysozyme. In some embodiments, the recombinant fusion protein comprises κ-casein, or fragment thereof, and lysozyme. In some embodiments, the recombinant fusion protein comprises para-κ-casein, or fragment thereof, and lysozyme.

[0204] In some embodiments, the recombinant fusion protein comprises α-S1 casein, or fragment thereof; and lactoferrin. In some embodiments, the recombinant fusion protein comprises α-S2 casein, or fragment thereof; and lactoferrin. In some embodiments, the recombinant fusion protein comprises β-casein, or fragment thereof; and lactoferrin. In some embodiments, the recombinant fusion protein comprises κ-casein, or fragment thereof; and lactoferrin. In some embodiments, the recombinant fusion protein comprises para-κ-casein, or fragment thereof; and lactoferrin.

[0205] In some embodiments, the recombinant fusion protein comprises α-S1 casein, or fragment thereof; and lactoperoxidase. In some embodiments, the recombinant fusion protein comprises α-S2 casein, or fragment thereof; and lactoperoxidase. In some embodiments, the recombinant fusion protein comprises β-casein, or fragment thereof; and lactoperoxidase. In some embodiments, the recombinant fusion protein comprises κ-casein, or fragment thereof; and lactoperoxidase. In some embodiments, the recombinant fusion protein comprises para-κ-casein, or fragment thereof; and lactoperoxidase.

[0206] In some embodiments, the recombinant fusion protein comprises α-S1 casein, or fragment thereof, and an immunoglobulin. In some embodiments, the recombinant fusion protein comprises α-S2 casein, or fragment thereof, and an immunoglobulin. In some embodiments, the recombinant fusion protein comprises β-casein, or fragment thereof, and an immunoglobulin. In some embodiments, the recombinant fusion protein comprises κ-casein, or fragment thereof, and an immunoglobulin. In some embodiments, the recombinant fusion protein comprises para-κ-casein, or fragment thereof, and an immunoglobulin.

[0207] In some embodiments, the first protein and the second protein are casein proteins. In some embodiments, the fusion protein comprises κ-casein and para-κ-casein. In some embodiments, the fusion protein comprises κ-casein and β-casein. In some embodiments, the fusion protein comprises κ-casein and α-S1-casein. In some embodiments, the fusion protein comprises κ-casein and α-S2-casein. In some embodiments, the fusion protein comprises para-κ-casein and β-casein. In some embodiments, the fusion protein comprises para-κ-casein and α-S1-casein. In some embodiments, the fusion protein comprises para-κ-casein and α-S2-casein. In some embodiments, the fusion protein comprises β-casein and α-S1-casein. In some embodiments, the fusion protein comprises β-casein and α-S2-casein. In some embodiments, the fusion protein comprises α-S1-casein and α-S2-casein.

[0208] In some embodiments, the fusion protein comprises two of the same casein proteins. In some embodiments, the fusion protein comprises a first protein and a second protein, wherein each of the first and second proteins are κ-casein. In some embodiments, the fusion protein comprises a first protein and a second protein, wherein each of the first and second proteins are β-casein. In some embodiments, the fusion protein comprises a first protein and a second protein, wherein each of the first and second proteins are para-κ-casein. In some embodiments, the fusion protein comprises a first protein and a second protein, wherein each of the first and second proteins are α-S1-casein. In some embodiments, the fusion protein comprises a first protein and a second protein wherein each of the first and second proteins are α-S2-casein.

[0209] In some embodiments, the fusion protein comprises, form N-terminus to C-terminus, a para-kappa-casein and a beta-lactoglobulin. In some embodiments, the fusion protein comprises, from N-terminus to C-terminus, a beta-lactoglobulin and a para-kappa-casein. In some embodiments, the fusion protein comprises, from N-terminus to C-terminus, an alpha-S1-casein and a beta-lactoglobulin. In some embodiments, the fusion protein comprises, from N-terminus to C-terminus, a beta-lactoglobulin and an alpha-S1-casein. In some embodiments, the fusion protein comprises, from N-terminus to C-terminus, a beta-casein and a beta-lactoglobulin. In some embodiments, the fusion protein comprises from N-terminus to C-terminus, a beta-lactoglobulin and a beta-casein.

### Fusion Proteins Comprising a Milk Protein and a Fusion Partner

[0210] In some embodiments, a fusion protein comprises a milk protein and a fusion partner having one or more desirable characteristics. For example, in some embodiments, a fusion protein comprises a first protein and a second protein, wherein the first protein is a milk protein, and the second protein comprises at least one of the following characteristics: (i) a molecular weight of 15 kDa or higher; (ii) at least 30% hydrophobic amino acids; and/or (iii) less than about 2.5 disulfide bonds per 10 kDa molecular weight. In some embodiments, the second protein comprises at least two of the characteristics (i), (ii) and (iii). In some embodiments, the second protein comprises all three of the characteristics (i), (ii) and (iii).

[0211] In some embodiments, a fusion protein comprises a milk protein and a fusion partner, wherein the fusion partner has a molecular weight of 15 kDa or higher. In some embodiments, a fusion protein comprises a milk protein and a fusion partner, wherein the fusion partner has at least 30% hydrophobic amino acids. In some embodiments, a fusion protein comprises a milk protein and a fusion partner, wherein the fusion partner has less than about 2.5 disulfide bonds per 10 kDa molecular weight. In some embodiments, a fusion protein comprises a milk protein and a fusion partner, wherein the fusion partner has a molecular weight of 15 kDa or higher, and at least 30% hydrophobic amino acids. In some embodiments, a fusion protein comprises a milk protein and a fusion partner, wherein the fusion partner has at least 30% hydrophobic amino acids, and less than about 2.5 disulfide bonds per 10 kDa molecular weight. In some embodiments, a fusion protein comprises a milk protein and a fusion partner, wherein the fusion partner has a molecular weight of 15 kDa or higher, and less than about 2.5 disulfide bonds per 10 kDa molecular weight. In some embodiments, a fusion protein comprises a milk protein and a fusion partner, wherein the fusion partner has a molecular weight of 15 kDa or higher, at least 30% hydrophobic amino acids, and less than about 2.5 disulfide bonds per 10 kDa molecular weight.

[0212] In some embodiments, the fusion protein comprises a protease cleavage site located between the first protein and the second protein. In some embodiments, the protease cleavage site is a chymosin cleavage site. In some embodiments, cleavage of the fusion protein with a protease separates the first protein from the second protein. In some embodiments, after being separated from one another, the first protein and/or the second protein optionally comprise at their N-terminus or C-terminus one or more amino acids that do not occur in the native form of the first protein or the second protein and that are derived from the protease cleavage site.

Fusion Proteins Comprising More than Two Proteins

[0213] Fusion proteins may also be created that comprise more than two proteins, such as at least 3, at least 4, at least 5, at least 6, at least 7, at least 8, at least 9, or at least 10, or more proteins. In some embodiments, a fusion protein comprising more than two proteins may comprise at least one milk protein. In some embodiments, a fusion protein comprising more than two proteins may comprise at least one casein protein. In some embodiments, each of the proteins in a fusion protein comprising more than two proteins may be a milk protein. In some embodiments, each of the proteins in a fusion protein comprising more than two proteins may be a casein protein.

[0214] In some embodiments, a fusion protein comprising more than two proteins may comprise at least one structured protein and at least one structured protein. In some embodiments, a fusion protein comprising more than two proteins may comprise at least one milk protein (e.g., a casein) and at least one non-milk protein. In some embodiments, a fusion protein comprising more than two proteins may comprise at least one milk protein (e.g., a casein) and at least one plant protein. In some embodiments, a fusion protein comprising more than two proteins may comprise at least one milk protein (e.g., a casein) and at least one animal (e.g., mammalian) protein.

[0215] In some embodiments, a fusion protein comprises three proteins, wherein each protein is individually selected from α-S1 casein, α-S2 casein, β-casein, κ-casein, para-κ-casein, β-lactoglobulin, α-lactalbumin, lysozyme, lactoferrin, lactoperoxidase, serum albumin, and an immunoglobulin. In some embodiments, a fusion protein comprises four proteins, wherein each protein is individually selected from α-S1 casein, α-S2 casein, β-casein, κ-casein, para-κ-casein, β-lactoglobulin, α-lactalbumin, lysozyme, lactoferrin, lactoperoxidase, serum albumin, and an immunoglobulin. In some embodiments, a fusion protein comprises five proteins, wherein each protein is individually selected from α-S1 casein, (t-S2 casein, β-casein, κ-casein, para-κ-casein, β-lactoglobulin, α-lactalbumin, lysozyme, lactoferrin, lactoperoxidase, serum albumin, and an immunoglobulin. In some embodiments, a fusion protein comprises six proteins, wherein each protein is individually selected from α-S1 casein, α-S2 casein, β-casein, κ-casein, para-κ-casein, β-lactoglobulin, α-lactalbumin, lysozyme, lactoferrin, lactoperoxidase, serum albumin, and an immunoglobulin. In some embodiments, a fusion protein comprises seven proteins, wherein each protein is individually selected from α-S1 casein, α-S2 casein, 3-casein, κ-casein, para-κ-casein, β-lactoglobulin, α-lactalbumin, lysozyme, lactoferrin, lactoperoxidase, serum albumin, and an immunoglobulin. In some embodiments, a fusion protein comprises eight proteins, wherein each protein is individually selected from α-S1 casein, α-S2 casein, β-casein, κ-casein, para-κ-casein, β-lactoglobulin, α-lactalbumin, lysozyme, lactoferrin, lactoperoxidase, serum albumin, and an immunoglobulin. In some embodiments, a fusion protein comprises nine proteins, wherein each protein is individually selected from α-S1 casein, α-S2 casein, β-casein, κ-casein, para-κ-casein, β-lactoglobulin, α-lactalbumin, lysozyme, lactoferrin, lactoperoxidase, serum albumin, and an immunoglobulin. In some embodiments, a fusion protein comprises ten proteins, wherein each protein is individually selected from α-S1 casein, α-S2 casein, β-casein, κ-casein, para-κ-casein, 3-lactoglobulin, α-lactalbumin, lysozyme, lactoferrin, lactoperoxidase, serum albumin, and an immunoglobulin.

[0216] In some embodiments, a fusion protein comprises three proteins, wherein each protein is individually selected from α-S1 casein, α-S2 casein, β-casein, κ-casein, and para-κ-casein. In some embodiments, a fusion protein comprises four proteins, wherein each protein is individually selected from α-S1 casein, α-S2 casein, β-casein, κ-casein, and para-κ-casein. In some embodiments, a fusion protein comprises five proteins, wherein each protein is individually selected from α-S1 casein, α-S2 casein, β-casein, κ-casein, and para-κ-casein. In some embodiments, a fusion protein comprises six proteins, wherein each protein is individually selected from α-S1 casein, α-S2 casein, β-casein, κ-casein, and para-κ-casein. In some embodiments, a fusion protein comprises seven proteins, wherein each protein is individually selected from α-S1 casein, α-S2 casein, β-casein, κ-casein, and para-κ-casein. In some embodiments, a fusion protein comprises eight proteins, wherein each protein is individually selected from α-S1 casein, α-S2 casein, β-casein, κ-casein, and para-κ-casein. In some embodiments, a fusion protein comprises nine proteins, wherein each protein is individually selected from α-S1 casein, α-S2 casein, β-casein, κ-casein, and para-κ-casein. In some embodiments, a fusion protein comprises ten proteins, wherein each protein is individually selected from α-S1 casein, α-S2 casein, β-casein, κ-casein, and para-κ-casein.

[0217] In some embodiments, a fusion protein comprises between 3 and 10 proteins, wherein each protein is different. In some embodiments, a fusion protein comprises between 3 and 10 proteins, wherein each protein is the same. In some embodiments, a fusion protein comprises between 3 and 10 proteins, wherein each protein is a milk protein. In some embodiments, a fusion protein comprises between 3 and 10 proteins, wherein each protein is a casein.

[0218] In some embodiments, a fusion protein comprises a first, a second, and a third protein, wherein the first protein is beta casein, the second protein is kappa casein, and the third protein is beta-lactoglobulin. See, e.g., SEQ ID NO: 652.

[0219] In some embodiments, a fusion protein comprises a first, second, a third, and a fourth protein, wherein the first protein is kappa casein, the second protein is beta casein, the third protein is alpha-S1-casein, and the fourth protein is beta-lactoglobulin. In some embodiments, a fusion protein comprises a first, second, and third protein, wherein the first protein is kappa casein, the second protein is beta casein, the third protein is beta-lactoglobulin. In some embodiments, a fusion protein comprises a first, second, and third protein, wherein the first protein is kappa casein, the second protein is alpha-S1-casein, the third protein is beta-lactoglobulin. In some embodiments, a fusion protein comprises a first, second, and third protein, wherein the first protein is beta-casein, the second protein is alpha-S1-casein, the third protein is beta-lactoglobulin. In some embodiments, a fusion protein comprises a first, second, and third protein, wherein the first protein is kappa-casein, the second protein is beta-casein, the third protein is alpha-S1-casein.

[0220] In some embodiments, a fusion protein comprising a first, second, third, and fourth protein, wherein the third protein is kappa-casein. In some embodiments, a fusion protein comprising a first, second, third, and fourth protein, wherein the third protein is kappa-casein, and the fourth protein is beta-lactoglobulin. In some embodiments, the kappa-casein comprises a chymosin cleavage site. In some embodiments, cleavage of the fusion protein with chymosin produces the following polypeptides: (a) a first polypeptide comprising the first protein, the second protein, and para-kappa-casein; (b) a second polypeptide comprising a kappa-casein macropeptide and the fourth protein.

[0221] In some embodiments, a fusion protein comprises a first, second, third, and fourth protein, wherein the first protein is beta-casein, the second protein is beta-casein, the third protein is kappa-casein, and the fourth protein is beta-lactoglobulin. See, e.g., SEQ ID NO: 652.

[0222] In some embodiments, a fusion protein comprises a first, second, third, fourth, and fifth protein wherein the first protein is beta-casein, the second protein is beta-casein, the third protein is beta-casein, the fourth protein is kappa-casein, and the fifth protein is beta-lactoglobulin. See, e.g., SEQ ID NO: 654.

[0223] In some embodiments, a fusion protein comprises a first, second, third, fourth, fifth, and sixth protein wherein the first protein is beta-casein, the second protein is beta-casein, the third protein is beta-casein, the fourth protein is beta-casein, the fifth protein is kappa-casein, and the sixth protein is beta-lactoglobulin. See, e.g., SEQ ID NO: 656.

[0224] In some embodiments, a fusion protein comprises a first, second, third, fourth, and fifth protein wherein the first protein is beta-casein, the second protein is beta-casein, the third protein is beta-casein, the fourth protein is beta-casein, and the fifth protein is beta-lactoglobulin. See, e.g., SEQ ID NO: 658 and 662.

[0225] In some embodiments, a fusion protein comprises a first, second, third, and fourth protein, wherein the first protein is beta-casein, the second protein is beta-casein, the third protein is beta-casein, and the fourth protein is beta-lactoglobulin. See, e.g., SEQ ID NO: 660.

[0226] In some embodiments, a fusion protein comprises a first, second, third, and fourth protein, wherein the first protein is beta-casein, the second protein is beta-casein, the third protein is beta-casein, and the fourth protein is beta-casein. See, e.g., SEQ ID NO: 664.

[0227] In some embodiments, a fusion protein comprises β-casein, α-S1 casein, α-S1 casein, and β-casein, in that respective configuration. In some embodiments, a fusion protein is encoded by a nucleic acid sequences that comprises at least about 80%, 85%, 90%, 95%, 97%, 98%, 99%, or up to about 100% identity to SEQ ID NO: 906.

[0228] In some embodiments, a fusion protein comprises β-casein, β-casein, κ-casein, and β-lactoglobulin, in that respective configuration. In some embodiments, a fusion protein is encoded by a nucleic acid sequence that comprises at least about 80%, 85%, 90%, 95%, 97%, 98%, 99%, or up to about 100% identity to SEQ ID NO: 908.

[0229] In some embodiments, a fusion protein comprises β-casein, β-casein, β-casein, j-casein, in that respective configuration. In some embodiments, a fusion protein is encoded by a nucleic acid sequence that comprises at least about 80%, 85%, 90%, 95%, 97%, 98%, 99%, or up to about 100% identity to SEQ ID NO: 910.

[0230] In some embodiments, a fusion protein comprises γ-zein and β-casein, in that respective configuration. In some embodiments, a fusion protein is encoded by a nucleic acid sequence that comprises at least about 80%, 85%, 90%, 95%, 97%, 98%, 99%, or up to about 10000 identity to SEQ ID NO: 912.

[0231] Table 5 lists illustrative fusion proteins contemplated by the instant disclosure. The fusion proteins comprise the listed constituent proteins in order from N-terminus to C-terminus. As will be understood by those of skill in the art, in some embodiments, a fusion protein may comprise the constituent proteins in order from C-terminus to N-terminus. In some embodiments, one or more of the fusion proteins may comprise a protease cleavage site, such as a protease cleavage site located between two of the constituent proteins.

TABLE 5
Illustrative Fusion Proteins

| Fusion | | | | | | Sixth |
|---|---|---|---|---|---|---|
| Protein | First | Second | Third | Fourth | Fifth | Pro- |
| No. | Protein | Protein | Protein | Protein | Protein | tein |
| 1 | BC | LG | | | | |
| 2 | BC | BC | LG | | | |
| 3 | BC | BC | KCN | LG | | |
| 4 | BC | BC | BC | KCN | LG | |
| 5 | BC | BC | BC | BC | BC | |
| 6 | BC | aS1 | aS1 | BC | | |
| 7 | BC | aS1 | aS1 | BC | LG | |
| 8 | BC | aS1 | BC | | | |
| 9 | ZN | BC | | | | |
| 10 | ZN27 | BC | | | | |
| 11 | BC | BC | | | | |
| 12 | BC | BC | BC | | | |
| 13 | BC | BC | BC | LG | | |
| 14 | BC | BC | BC | BC | LG | |
| 15 | KCN | BC | BC | BC | | |
| 16 | KCN | BC | BC | | | |
| 17 | KCN | BC | aS1 | LG | | |
| 18 | BC | BC | aS1 | aS1 | BC | BC |
| 19 | paraKCN | paraKCN | paraKCN | BC | BC | |
| 20 | BC | aS1 | KCN | | | |
| 21 | aS1 | LG | | | | |
| 22 | KCN | LG | | | | |
| 23 | paraKCN | LG | | | | |
| 24 | aS1 | aS1 | aS1 | aS1 | | |
| 25 | KCN | KCN | KCN | KCN | | |
| 26 | aS1 | aS1 | aS1 | aS1 | LG | |
| 27 | KCN | KCN | KCN | KCN | LG | |
| 28 | paraKCN | paraKCN | paraKCN | paraKCN | LG | |
| 29 | paraKCN | paraKCN | paraKCN | paraKCN | | |
| 30 | KCN | BC | aS1 | LG | | |
| 31* | KCN | BC | aS1 | | | |
| 32* | KCN | BC | | | | |
| 33* | BC | BC | BC | BC | | |

BC = beta-casein, LG = beta-lactoglobulin, KCN = kappa-casein; paraKCN = para-kappa-casein, aSI = alpha-S1-casein, ZN = truncated zein, ZN27-full-length zein
*indicates that the vector used to express the listed fusion protein also comprises a sequence encoding a Fam kinase, wherein the Fam kinase is expressed under the control of a different promoter.

### Fusion Protein Structure

[0232] The fusion proteins described herein may have various structures, to increase expression and/or accumulation in a plant or other host organism or cell. The designation of “first protein”, “second protein”, “third protein”, and/or “fourth protein” is not intended to imply any order.

[0233] In some embodiments, the fusion protein may comprise, from N-terminus to C-terminus, the first protein and the second protein. In some embodiments, the fusion protein may comprise, from N-terminus to C-terminus, the second protein and the first protein. In some embodiments, a fusion protein comprises, in order from N-terminus to C-terminus, a first protein and a second protein, wherein the first protein and/or the second protein is a milk protein. In some embodiments, a fusion protein comprises, in order from N-terminus to C-terminus, a second protein and a first protein, wherein the first protein and/or the second protein is a milk protein. For example, in some embodiments, a fusion protein comprises, in order from N-terminus to C-terminus, κ-casein and β-lactoglobulin. In some embodiments, a fusion protein comprises, in order from N-terminus to C-terminus, β-lactoglobulin and κ-casein. In some embodiments, a fusion protein comprises, in order from N-terminus to C-terminus, para-κ-casein and β-lactoglobulin. In some embodiments, a fusion protein comprises, in order from N-terminus to C-terminus, β-lactoglobulin and para-κ-casein. In some embodiments, a fusion protein comprises, in order from N-terminus to C-terminus, β-casein and β-lactoglobulin. In some embodiments, a fusion protein comprises, in order from N-terminus to C-terminus, 0-lactoglobulin and β-casein. In some embodiments, a fusion protein comprises, in order from N-terminus to C-terminus, α-S1 casein and β-lactoglobulin. In some embodiments, a fusion protein comprises, in order from N-terminus to C-terminus, β-lactoglobulin and α-S1 casein.

[0234] In some embodiments, a fusion protein comprises, in order from N-terminus to C-terminus, a milk protein and a plant protein. In some embodiments, a fusion protein comprises, in order from N-terminus to C-terminus, a plant protein and a milk protein. In some embodiments, a fusion protein comprises, in order from N-terminus to C-terminus, a casein protein and a plant protein. In some embodiments, a fusion protein comprises, in order from N-terminus to C-terminus, a plant protein and a casein protein.

### Cleavable Fusion Proteins

[0235] In some embodiments, it may be desirable to cleave the fusion protein to separate its constituent proteins. For example, it may be desirable to cleave the fusion protein to separate its constituent proteins so that the proteins may individually be used in one or more food compositions.

[0236] In some embodiments, a fusion protein comprises a protease cleavage site. For example, in some embodiments, the fusion protein comprises an endoprotease, endopeptidase, and/or endoproteinase cleavage site. In some embodiments, the fusion protein comprises a rennet cleavage site. In some embodiments, the fusion protein comprises a chymosin cleavage site. In some embodiments, the fusion protein comprises a trypsin cleavage site.

[0237] The protease cleavage site may be located between the first protein and the second protein. In some embodiments, the protease cleavage site may be located between a milk protein and the non-milk protein. For example, the protease cleavage site may be located between the milk protein and the animal (e.g., mammalian or avian) protein, or between the milk protein and the plant protein, such that cleavage of the protein at the protease cleavage site will separate the two proteins. In some embodiments, the protease cleavage site may be located between a first milk protein and a second milk protein. In some embodiments, the protease cleavage site may be located between a first casein protein and a second casein protein.

[0238] In some embodiments, the protease cleavage site may be contained within the sequence of the first protein or the second protein. In some embodiments, the protease cleavage site may be located in either the milk protein or the non-milk protein, for example, the animal (e.g., mammalian or animal) or plant protein. In some embodiments, the protease cleavage site may be added separately, for example, between the two proteins.

[0239] In some embodiments, a fusion protein comprises a chymosin cleavage site. In some embodiments, a fusion protein comprises a chymosin cleavage site selected from any one of the sequences shown in Table 6, below. In some embodiments, a fusion protein comprises a chymosin cleavage site that is not shown in Table 6, below. In some embodiments, a fusion protein comprises a chymosin cleavage site having at least 1, at least 2, at least 3 or at least 4 amino acid substitutions relative to any one of the sequences shown in Table 6. In some embodiments, a fusion protein comprises a chymosin cleavage site with a sequence of any one of SEQ ID NO: 665-668, or a sequence having 1, 2, 3, 4, or more amino acid substitutions relative thereto. In the sequences of Table 6, cleavage typically occurs after the underlined residue.

TABLE 6
Chymosin cleavage sites

| Chymosin Cleavage Site | SEQ ID NO: |
|---|---|
| RHPHPHLSFMAIPPKK | 665 |
| HPHPHLSFMAIPPK | 666 |
| RHPHPHLSFM | 667 |
| EDFLQKQQYGISSKFR | 668 |
| RHPHPHLSFMAIPPKK | 669 |
| HHPHPHLSFMAIPPKK | 670 |
| RHPHPRLSFMAIPPKK | 671 |
| RRPRPHLSFMAIPPKK | 672 |
| HQTFQHASFIATPPQK | 673 |
| RRPNLHPSFIAIPPKK | 674 |
| PYAIPNPSFLAMPTNE | 675 |
| PHPIPNPSFLAIPTNE | 676 |
| RHPCPHPSFIAIPPKK | 677 |
| ARRPPHASFIAIPPKK | 678 |
| VGRHSHPFFMAILPNK | 679 |
| RRPRPRPSFIAIPPKK | 680 |
| RHPRPHPSFIAIPPKX | 681 |
| RHPYRRPSFIAIPPKK | 682 |
| RHPHLPASFIVIPPKK | 683 |
| CRRRPHPSFLAIPPXK | 684 |
| HRPNLHPSFIAIPPKK | 685 |
| HRPQLHPSFIAIPPKK | 686 |
| HRPHIHPSFIAIPPKK | 687 |
| HRPHLHPSFIAIPPKK | 688 |
| HRPHLHPSFIAIPAKK | 689 |
| HHPHPCPSFLAIPPKK | 690 |
| HRPHLHPSFTAIPAKK | 691 |
| HHPHPRPSFTAIPPKK | 692 |
| HHPHPRPSFLAIPPKK | 693 |
| HRPHLHPSFIAIPTKK | 694 |
| HHKYLKPSFIVIPPTK | 695 |
| RHPRPHPSFIAIPPKK | 696 |
| YHQAKHPSFMAILSKK | 697 |
| PHTYLKPPFIVIPPKK | 698 |
| HRPKLHPSFIAVPPKK | 699 |
| RRPHPRLSFMAIPPKK | 700 |
| KPAEFFRL | 701 |
| KPAEFKRL | 702 |
| KPAEFERL | 703 |
| KPAEFTRL | 704 |
| KPAEFGRL | 705 |
| KPAEFARL | 706 |
| KPAEFVRL | 707 |
| KPAEFLRL | 708 |
| KPAEFIRL | 709 |
| HPHLSFMAI | 710 |
| HPHLSFEAI | 711 |
| YGIFLRF | 712 |
| YGIFKRF | 713 |
| YGAFLRF | 714 |
| KYSSWYVAL | 715 |
| KYSSWKVAL | 716 |
| KYSSWEVAL | 717 |
| KYSSWLVAL | 718 |
| RPKPQQFFGLM | 719 |
| RPKPQQFKGLM | 720 |
| AFPLEFKREL | 721 |
| AFPLEFKREL | 722 |
| AFPLEFEREL | 723 |
| AFPLEFEREL | 724 |
| AFPLEFIREL | 725 |
| AFPLEFFREL | 726 |
| KIPYILKRQL | 727 |
| KIPYILRRQL | 728 |
| KIPYILERQL | 729 |
| KIPYILSRQL | 730 |
| KIPYILARQL | 731 |
| KIPYILIRQL | 732 |
| KIPYILFRQL | 733 |
| KIPYILFRQL | 734 |
| KIPYILWRQL | 735 |
| EDFLQKQQYGISSKYSGFG | 736 |
| EDFLQKQQYGISSKFM | 737 |
| EDFLQKQQYGISSKFA | 738 |
| EDFLQKQQYGISSKFC | 739 |
| EDFLQKQQYGISSKFF | 740 |
| EDFLQKQQYGISSKFH | 741 |
| EDFLQKQQYGISSKFI | 742 |
| EDFLQKQQYGISSKFK | 743 |
| EDFLQKQQYGISSKFL | 744 |
| EDFLQKQQYGISSKFN | 745 |
| EDFLQKQQYGISSKFR | 746 |
| EDFLQKQQYGISSKFT | 747 |
| EDFLQKQQYGISSKFV | 748 |
| EDFLQKQQYGISSKFW | 749 |
| EDFLQKQQYGISSKYSGFV | 750 |
| EDFLQKQQYGISSKYSGFV | 751 |
| EDFLQKQQYGISSKYSGFM | 752 |
| EDFLQKQQYGISSKYSGFM | 753 |
| EDFLQKQQYGISSKYSGFS | 754 |
| EDFLQKQQYGISSKSSGFV | 755 |
| EDFLQKQQYGISSKSSGFV | 756 |
| EDFLQKQQYGISSKSSGFV | 757 |
| EDFLQKQQYGISSKYV | 758 |
| EDFLQKQQYGISSKFS | 759 |

[0240] In some embodiments, a fusion protein comprises a cleavage site recognized by an endoprotease. For example, in some embodiments, a fusion protein comprises a cleavage site selected from any one of the sequences shown in Table 7, below. In some embodiments, a fusion protein comprises a cleavage site having at least 1, at least 2, at least 3 or at least 4 amino acid substitutions relative to any one of the sequences shown in Table 7. In the sequences of Table 7, cleavage typically occurs after the underlined residue.

TABLE 7
Endoprotease Cleavage Sites

| Cleavage Site | SEQ ID NO: | Endoprotease |
|---|---|---|
| DDDDK | 760 | Enterokinase |
| HPHLSFMAI | 761 | Pepsin A |
| HPHLSFEAI | 762 | Pepsin A |
| LVPRG | 763 | Thrombin |
| ELSLSRLRDSA | 764 | Thrombin |
| ELSLSRLR | 765 | Thrombin |
| DNYTRLRK | 766 | Thrombin |
| YTRLRKQM | 767 | Thrombin |
| APSGRVSM | 768 | Thrombin |
| VSMIKNLQ | 769 | Thrombin |
| RIRPKLKW | 770 | Thrombin |
| AMAPRERK | 771 | Thrombin |
| NFFWKTFT | 772 | Thrombin |
| KMYPRGNH | 773 | Thrombin |
| QTYPRTNT | 774 | Thrombin |
| IQGR | 775 | Factor Xa |
| IEGR | 776 | Factor Xa |
| ENLYFQ(G/S) (G/S = G | 777 | TEV protease |
| or S) | | |
| EXXYXQ(G/S) (x = any | 778 | TEV protease |
| amino acid, G/S = G | | |
| or S) | | |
| VDVADX (x = any amino | 779 | Caspase 2 |
| acid) | | |
| RXXR (x = any amino | 780 | Furin |
| acid) | | |
| XX(T/A/S/V)XX (x = any | 781 | Alpha-lytic |
| amino acid) | | protease |

[0241] In some embodiments, a fusion protein comprises a cleavage site that is sensitive to cleavage by one or more chemical agents, such as nickel, formic acid, or hydroxylamine. For example, in some embodiments, a fusion protein comprises a chemical cleavage site selected from any one of the sequences shown in Table 8, below. In the sequences of Table 8, cleavage typically occurs after the underlined residue.

TABLE 8
Chemical Cleavage Sites

| Chemical Cleavage Site | SEQ ID NO: | Chemical agent |
|---|---|---|
| GSHHW | 782 | Nickel |
| DP | — | Formic Acid |
| NG | — | Hydroxylamine |

[0242] In some embodiments, the fusion protein comprises a protease cleavage site that comprises the amino acids residues F and M (phenylalanine and methionine). Without being bound by any theory, it is believed that one or more enzymes (e.g., chymosin) and cleave between the F and the M. When a protease, such as chymosin, is used to cleave a fusion protein comprising an FM cleavage site, the first protein comprises the F at its C terminus and the second protein comprises a M at its N terminus when liberated from the fusion protein. For example, a protein separated from a fusion protein by cleavage of an FM site may comprise the sequence of any one of SEQ ID NO: 782-791. Thus, in some embodiments, a protein derived from (i.e., separated from) a fusion protein may comprise at least one non-native amino acid. In some embodiments, the non-native amino acid is derived from a protease cleavage site.

[0243] In some embodiments, a fusion protein comprises a linker between the first protein and the second protein. In some embodiments, the linker is between the milk protein and the animal (e.g., mammalian or avian) protein, or between the milk protein and the plant protein. In some embodiments, the linker is between a first milk protein and a second milk protein. In some embodiments, the linker is between a first casein protein and a second casein protein. In some embodiments, the linker may comprise a peptide sequence recognizable by an endoprotease. In some embodiments, the linker may comprise a protease cleavage site. In some embodiments, the linker may comprise a self-cleaving peptide, such as a 2A peptide.

[0244] In some embodiments, a fusion protein may comprise a signal peptide. The signal peptide may be cleaved from the fusion protein, for example, during processing or transport of the protein within the cell. In some embodiments, the signal peptide is located at the N-terminus of the fusion protein. In some embodiments, the signal peptide is located at the C-terminus of the fusion protein.

[0245] In some embodiments, the signal peptide is selected from the group consisting of GmSCB1, StPat21, 2Sss, Sig2, Sig12, Sig8, Sig10, Sig11, and Coixss. In some embodiments, the signal peptide is Sig10 and comprises SEQ ID NO: 15, or a sequence at least 90%, at least 95%, at least 96%, at least 97%, at least 98%, or at least 99% identical thereto. In some embodiments, the signal peptide is Sig2 and comprises SEQ ID NO: 17, or a sequence at least 90%, at least 95%, at least 96%, at least 97%, at least 98%, or at least 99% identical thereto.

[0246] In some embodiments, the fusion protein comprises the sequence of SEQ ID NO: 71. In some embodiments, the fusion protein comprises the sequence of SEQ ID NO: 73. In some embodiments, the fusion protein comprises the sequence of SEQ ID NO: 75. In some embodiments, the fusion protein comprises the sequence of SEQ ID NO: 77. In some embodiments, the fusion protein comprises the sequence of SEQ ID NO: 79. In some embodiments, the fusion protein comprises the sequence of SEQ ID NO: 81. In some embodiments, the fusion protein comprises the sequence of SEQ ID NO: 135. In some embodiments, the fusion protein comprises the sequence of SEQ ID NO: 137. In some embodiments, the fusion protein comprises the sequence of SEQ ID NO: 616. In some embodiments, the fusion protein comprises the sequence of SEQ ID NO: 618. In some embodiments, the fusion protein comprises the sequence of SEQ ID NO: 620. In some embodiments, the fusion protein comprises the sequence of SEQ ID NO: 622. In some embodiments, the fusion protein comprises the sequence of SEQ ID NO: 624. In some embodiments, the fusion protein comprises the sequence of SEQ ID NO: 626. In some embodiments, the fusion protein comprises the sequence of SEQ ID NO: 628. In some embodiments, the fusion protein comprises the sequence of SEQ ID NO: 630. In some embodiments, the fusion protein comprises the sequence of SEQ ID NO: 632. In some embodiments, the fusion protein comprises the sequence of SEQ ID NO: 634. In some embodiments, the fusion protein comprises the sequence of SEQ ID NO: 636. In some embodiments, the fusion protein comprises the sequence of SEQ ID NO: 638. In some embodiments, the fusion protein comprises the sequence of SEQ ID NO: 640. In some embodiments, the fusion protein comprises the sequence of SEQ ID NO: 642. In some embodiments, the fusion protein comprises the sequence of SEQ ID NO: 644. In some embodiments, the fusion protein comprises the sequence of SEQ ID NO: 646. In some embodiments, the fusion protein comprises the sequence of SEQ ID NO: 648. In some embodiments, the fusion protein comprises the sequence of SEQ ID NO: 650. In some embodiments, the fusion protein comprises the sequence of SEQ ID NO: 652. In some embodiments, the fusion protein comprises the sequence of SEQ ID NO: 654. In some embodiments, the fusion protein comprises the sequence of SEQ ID NO: 656. In some embodiments, the fusion protein comprises the sequence of SEQ ID NO: 658. In some embodiments, the fusion protein comprises the sequence of SEQ ID NO: 660. In some embodiments, the fusion protein comprises the sequence of SEQ ID NO: 662. In some embodiments, the fusion protein comprises the sequence of SEQ ID NO: 664. In some embodiments, the fusion protein comprises the sequence of SEQ ID NO: 793. In some embodiments, the fusion protein comprises the sequence of SEQ ID NO: 795. In some embodiments, the fusion protein comprises the sequence of SEQ ID NO: 797. In some embodiments, the fusion protein comprises the sequence of SEQ ID NO: 799.

[0247] In some embodiments, the fusion protein comprises the sequence of SEQ ID NO: 71, with 1, 2, 3, 4, 5, 6, 7, 8, 9, 10, or more amino acid substitutions. In some embodiments, the fusion protein comprises the sequence of SEQ ID NO: 73, with 1, 2, 3, 4, 5, 6, 7, 8, 9, 10, or more amino acid substitutions. In some embodiments, the fusion protein comprises the sequence of SEQ ID NO: 75, with 1, 2, 3, 4, 5, 6, 7, 8, 9, 10, or more amino acid substitutions. In some embodiments, the fusion protein comprises the sequence of SEQ ID NO: 77, with 1, 2, 3, 4, 5, 6, 7, 8, 9, 10, or more amino acid substitutions. In some embodiments, the fusion protein comprises the sequence of SEQ ID NO: 79, with 1, 2, 3, 4, 5, 6, 7, 8, 9, 10, or more amino acid substitutions. In some embodiments, the fusion protein comprises the sequence of SEQ ID NO: 81, with 1, 2, 3, 4, 5, 6, 7, 8, 9, 10, or more amino acid substitutions. In some embodiments, the fusion protein comprises the sequence of SEQ ID NO: 135, with 1, 2, 3, 4, 5, 6, 7, 8, 9, 10, or more amino acid substitutions. In some embodiments, the fusion protein comprises the sequence of SEQ ID NO: 137, with 1, 2, 3, 4, 5, 6, 7, 8, 9, 10, or more amino acid substitutions. In some embodiments, the fusion protein comprises the sequence of SEQ ID NO: 616, with 1, 2, 3, 4, 5, 6, 7, 8, 9, 10, or more amino acid substitutions. In some embodiments, the fusion protein comprises the sequence of SEQ ID NO: 618, with 1, 2, 3, 4, 5, 6, 7, 8, 9, 10, or more amino acid substitutions. In some embodiments, the fusion protein comprises the sequence of SEQ ID NO: 620, with 1, 2, 3, 4, 5, 6, 7, 8, 9, 10, or more amino acid substitutions. In some embodiments, the fusion protein comprises the sequence of SEQ ID NO: 622, with 1, 2, 3, 4, 5, 6, 7, 8, 9, 10, or more amino acid substitutions. In some embodiments, the fusion protein comprises the sequence of SEQ ID NO: 624, with 1, 2, 3, 4, 5, 6, 7, 8, 9, 10, or more amino acid substitutions. In some embodiments, the fusion protein comprises the sequence of SEQ ID NO: 626, with 1, 2, 3, 4, 5, 6, 7, 8, 9, 10, or more amino acid substitutions. In some embodiments, the fusion protein comprises the sequence of SEQ ID NO: 628, with 1, 2, 3, 4, 5, 6, 7, 8, 9, 10, or more amino acid substitutions. In some embodiments, the fusion protein comprises the sequence of SEQ ID NO: 630, with 1, 2, 3, 4, 5, 6, 7, 8, 9, 10, or more amino acid substitutions. In some embodiments, the fusion protein comprises the sequence of SEQ ID NO: 632, with 1, 2, 3, 4, 5, 6, 7, 8, 9, 10, or more amino acid substitutions. In some embodiments, the fusion protein comprises the sequence of SEQ ID NO: 634, with 1, 2, 3, 4, 5, 6, 7, 8, 9, 10, or more amino acid substitutions. In some embodiments, the fusion protein comprises the sequence of SEQ ID NO: 636, with 1, 2, 3, 4, 5, 6, 7, 8, 9, 10, or more amino acid substitutions. In some embodiments, the fusion protein comprises the sequence of SEQ ID NO: 638, with 1, 2, 3, 4, 5, 6, 7, 8, 9, 10, or more amino acid substitutions. In some embodiments, the fusion protein comprises the sequence of SEQ ID NO: 640, with 1, 2, 3, 4, 5, 6, 7, 8, 9, 10, or more amino acid substitutions. In some embodiments, the fusion protein comprises the sequence of SEQ ID NO: 642, with 1, 2, 3, 4, 5, 6, 7, 8, 9, 10, or more amino acid substitutions. In some embodiments, the fusion protein comprises the sequence of SEQ ID NO: 644, with 1, 2, 3, 4, 5, 6, 7, 8, 9, 10, or more amino acid substitutions. In some embodiments, the fusion protein comprises the sequence of SEQ ID NO: 646, with 1, 2, 3, 4, 5, 6, 7, 8, 9, 10, or more amino acid substitutions. In some embodiments, the fusion protein comprises the sequence of SEQ ID NO: 648, with 1, 2, 3, 4, 5, 6, 7, 8, 9, 10, or more amino acid substitutions. In some embodiments, the fusion protein comprises the sequence of SEQ ID NO: 650, with 1, 2, 3, 4, 5, 6, 7, 8, 9, 10, or more amino acid substitutions. In some embodiments, the fusion protein comprises the sequence of SEQ ID NO: 652, with 1, 2, 3, 4, 5, 6, 7, 8, 9, 10, or more amino acid substitutions. In some embodiments, the fusion protein comprises the sequence of SEQ ID NO: 654, with 1, 2, 3, 4, 5, 6, 7, 8, 9, 10, or more amino acid substitutions. In some embodiments, the fusion protein comprises the sequence of SEQ ID NO: 656, with 1, 2, 3, 4, 5, 6, 7, 8, 9, 10, or more amino acid substitutions. In some embodiments, the fusion protein comprises the sequence of SEQ ID NO: 658, with 1, 2, 3, 4, 5, 6, 7, 8, 9, 10, or more amino acid substitutions. In some embodiments, the fusion protein comprises the sequence of SEQ ID NO: 660, with 1, 2, 3, 4, 5, 6, 7, 8, 9, 10, or more amino acid substitutions. In some embodiments, the fusion protein comprises the sequence of SEQ ID NO: 662, with 1, 2, 3, 4, 5, 6, 7, 8, 9, 10, or more amino acid substitutions. In some embodiments, the fusion protein comprises the sequence of SEQ ID NO: 664, with 1, 2, 3, 4, 5, 6, 7, 8, 9, 10, or more amino acid substitutions. In some embodiments, the fusion protein comprises the sequence of SEQ ID NO: 793, with 1, 2, 3, 4, 5, 6, 7, 8, 9, 10, or more amino acid substitutions. In some embodiments, the fusion protein comprises the sequence of SEQ ID NO: 795, with 1, 2, 3, 4, 5, 6, 7, 8, 9, 10, or more amino acid substitutions. In some embodiments, the fusion protein comprises the sequence of SEQ ID NO: 797, with 1, 2, 3, 4, 5, 6, 7, 8, 9, 10, or more amino acid substitutions. In some embodiments, the fusion protein comprises the sequence of SEQ ID NO: 799, with 1, 2, 3, 4, 5, 6, 7, 8, 9, 10, or more amino acid substitutions.

[0248] In some embodiments, the fusion protein comprises the sequence of SEQ ID NO: 71, or a sequence at least 90%, at least 95%, at least 96%, at least 97%, at least 98%, or at least 99% identical thereto. In some embodiments, the fusion protein comprises the sequence of SEQ ID NO: 73, or a sequence at least 90%, at least 95%, at least 96%, at least 97%, at least 98%, or at least 99% identical thereto. In some embodiments, the fusion protein comprises the sequence of SEQ ID NO: 75, or a sequence at least 90%, at least 95%, at least 96%, at least 97%, at least 98%, or at least 99% identical thereto. In some embodiments, the fusion protein comprises the sequence of SEQ ID NO: 77, or a sequence at least 90%, at least 95%, at least 96%, at least 97%, at least 98%, or at least 99% identical thereto. In some embodiments, the fusion protein comprises the sequence of SEQ ID NO: 79, or a sequence at least 90%, at least 95%, at least 96%, at least 97%, at least 98%, or at least 99% identical thereto. In some embodiments, the fusion protein comprises the sequence of SEQ ID NO: 81, or a sequence at least 90%, at least 95%, at least 96%, at least 97%, at least 98%, or at least 99% identical thereto. In some embodiments, the fusion protein comprises the sequence of SEQ ID NO: 135, or a sequence at least 90%, at least 95%, at least 96%, at least 97%, at least 98%, or at least 99% identical thereto. In some embodiments, the fusion protein comprises the sequence of SEQ ID NO: 137, or a sequence at least 90%, at least 95%, at least 96%, at least 97%, at least 98%, or at least 99% identical thereto. In some embodiments, the fusion protein comprises the sequence of SEQ ID NO: 616, or a sequence at least 90%, at least 95%, at least 96%, at least 97%, at least 98%, or at least 99% identical thereto. In some embodiments, the fusion protein comprises the sequence of SEQ ID NO: 618, or a sequence at least 90%, at least 95%, at least 96%, at least 97%, at least 98%, or at least 99% identical thereto. In some embodiments, the fusion protein comprises the sequence of SEQ ID NO: 620, or a sequence at least 90%, at least 95%, at least 96%, at least 97%, at least 98%, or at least 99% identical thereto. In some embodiments, the fusion protein comprises the sequence of SEQ ID NO: 622, or a sequence at least 90%, at least 95%, at least 96%, at least 97%, at least 98%, or at least 99% identical thereto. In some embodiments, the fusion protein comprises the sequence of SEQ ID NO: 624, or a sequence at least 90%, at least 95%, at least 96%, at least 97%, at least 98%, or at least 99% identical thereto. In some embodiments, the fusion protein comprises the sequence of SEQ ID NO: 626, or a sequence at least 90%, at least 95%, at least 96%, at least 97%, at least 98%, or at least 99% identical thereto. In some embodiments, the fusion protein comprises the sequence of SEQ ID NO: 628, or a sequence at least 90%, at least 95%, at least 96%, at least 97%, at least 98%, or at least 99% identical thereto. In some embodiments, the fusion protein comprises the sequence of SEQ ID NO: 630, or a sequence at least 90%, at least 95%, at least 96%, at least 97%, at least 98%, or at least 99% identical thereto. In some embodiments, the fusion protein comprises the sequence of SEQ ID NO: 632, or a sequence at least 90%, at least 95%, at least 96%, at least 97%, at least 98%, or at least 99% identical thereto. In some embodiments, the fusion protein comprises the sequence of SEQ ID NO: 634, or a sequence at least 90%, at least 95%, at least 96%, at least 97%, at least 98%, or at least 99% identical thereto. In some embodiments, the fusion protein comprises the sequence of SEQ ID NO: 636, or a sequence at least 90%, at least 95%, at least 96%, at least 97%, at least 98%, or at least 99% identical thereto. In some embodiments, the fusion protein comprises the sequence of SEQ ID NO: 638, or a sequence at least 90%, at least 95%, at least 96%, at least 97%, at least 98%, or at least 99% identical thereto. In some embodiments, the fusion protein comprises the sequence of SEQ ID NO: 640, or a sequence at least 90%, at least 95%, at least 96%, at least 97%, at least 98%, or at least 99% identical thereto. In some embodiments, the fusion protein comprises the sequence of SEQ ID NO: 642, or a sequence at least 90%, at least 95%, at least 96%, at least 97%, at least 98%, or at least 99% identical thereto. In some embodiments, the fusion protein comprises the sequence of SEQ ID NO: 644, or a sequence at least 90%, at least 95%, at least 96%, at least 97%, at least 98%, or at least 99% identical thereto. In some embodiments, the fusion protein comprises the sequence of SEQ ID NO: 646, or a sequence at least 90%, at least 95%, at least 96%, at least 97%, at least 98%, or at least 99% identical thereto. In some embodiments, the fusion protein comprises the sequence of SEQ ID NO: 648, or a sequence at least 90%, at least 95%, at least 96%, at least 97%, at least 98%, or at least 99% identical thereto. In some embodiments, the fusion protein comprises the sequence of SEQ ID NO: 650, or a sequence at least 90%, at least 95%, at least 96%, at least 97%, at least 98%, or at least 99% identical thereto. In some embodiments, the fusion protein comprises the sequence of SEQ ID NO: 652, or a sequence at least 90%, at least 95%, at least 96%, at least 97%, at least 98%, or at least 99% identical thereto. In some embodiments, the fusion protein comprises the sequence of SEQ ID NO: 654, or a sequence at least 90%, at least 95%, at least 96%, at least 97%, at least 98%, or at least 99% identical thereto. In some embodiments, the fusion protein comprises the sequence of SEQ ID NO: 656, or a sequence at least 90%, at least 95%, at least 96%, at least 97%, at least 98%, or at least 99% identical thereto. In some embodiments, the fusion protein comprises the sequence of SEQ ID NO: 658, or a sequence at least 90%, at least 95%, at least 96%, at least 97%, at least 98%, or at least 99% identical thereto. In some embodiments, the fusion protein comprises the sequence of SEQ ID NO: 660, or a sequence at least 90%, at least 95%, at least 96%, at least 97%, at least 98%, or at least 99% identical thereto. In some embodiments, the fusion protein comprises the sequence of SEQ ID NO: 662, or a sequence at least 90%, at least 95%, at least 96%, at least 97%, at least 98%, or at least 99% identical thereto. In some embodiments, the fusion protein comprises the sequence of SEQ ID NO: 664, or a sequence at least 90%, at least 95%, at least 96%, at least 97%, at least 98%, or at least 99% identical thereto. In some embodiments, the fusion protein comprises the sequence of SEQ ID NO: 793, or a sequence at least 90%, at least 95%, at least 96%, at least 97%, at least 98%, or at least 99% identical thereto. In some embodiments, the fusion protein comprises the sequence of SEQ ID NO: 795, or a sequence at least 90%, at least 95%, at least 96%, at least 97%, at least 98%, or at least 99% identical thereto. In some embodiments, the fusion protein comprises the sequence of SEQ ID NO: 797, or a sequence at least 90%, at least 95%, at least 96%, at least 97%, at least 98%, or at least 99% identical thereto. In some embodiments, the fusion protein comprises the sequence of SEQ ID NO: 799, or a sequence at least 90%, at least 95%, at least 96%, at least 97%, at least 98%, or at least 99% identical thereto.

[0249] In some embodiments, the fusion proteins have a molecular weight in the range of about 1 kDa to about 500 kDa, about 1 kDa to about 250 kDa, about 1 to about 100 kDa, about 10 to about 50 kDa, about 1 to about 10 kDa, about 10 to about 200 kDa, about 30 to about 150 kDa, about 30 kDa to about 50 kDa, or about 20 to about 80 kDa.

### Nucleic Acids Encoding Fusion Proteins and Vectors Comprising the Same

[0250] Also provided herein are nucleic acids encoding the fusion proteins of the disclosure. In some embodiments, the nucleic acids are DNAs. In some embodiments, the nucleic acids are RNAs.

[0251] Also provided herein are examples of expression cassettes for the expression of casein proteins in non-mammalian systems, such as plants and microorganisms, to produce recombinant casein proteins. The expression cassette may comprise, for example, a promoter, a 5′ untranslated region (UTR), a sequence encoding one or more casein proteins, and a terminator. The expression cassette may further comprise a selectable marker and retention signal.

[0252] In some embodiments, a nucleic acid comprises a sequence encoding a fusion protein. In some embodiments, a nucleic acid comprises a sequence encoding a fusion protein, which is operably linked to a promoter. In some embodiments, a nucleic acid comprises, in order from 5′ to 3′, a promoter, a 5′ untranslated region (UTR), a sequence encoding a fusion protein, and a terminator.

[0253] The promoter may be a plant promoter. A “plant promoter” is a promoter capable of initiating transcription in plant cells. Examples of promoters under developmental control include promoters that preferentially initiate transcription in certain organs, such as leaves, roots, flowers, seeds and tissues such as fibers, xylem vessels, tracheids, or sclerenchyma. Such promoters are referred to as “tissue-preferred.” Promoters which initiate transcription only in certain tissue are referred to as “tissue-specific.” A “cell-type” specific promoter primarily drives expression in certain cell types in one or more organs, for example, vascular cells in leaves, roots, flowers, or seeds. An “inducible” promoter is a promoter which is under environmental control. Examples of environmental conditions that may affect transcription by inducible promoters include anaerobic conditions or the presence of light. Tissue-specific, tissue-preferred, cell-type specific, and inducible promoters constitute the class of “non-constitutive” promoters. A “constitutive” promoter is a promoter which is active under most environmental conditions.

[0254] In some embodiments, the promoter is a plant promoter derived from, for example soybean, lima bean, Arabidopsis, tobacco, rice, maize, barley, sorghum, wheat, pea, and/or oat. In some embodiments, the promoter is a constitutive or an inducible promoter. Exemplary constitutive promoters include, but are not limited to, the promoters from plant viruses such as the 35S promoter from CaMV and the promoters from such genes as rice actin; ubiquitin; pEMU; MAS and maize H3 histone. In some embodiments, the constitutive promoter is the ALS promoter, Xbal/Ncol fragment 5′ to the Brassica napus ALS3 structural gene (or a nucleotide sequence similarity to said Xbal/Ncol fragment).

[0255] In some embodiments, the promoter is a plant tissue-specific or tissue-preferential promoter. In some embodiments, the promoter is isolated or derived from a soybean gene. Illustrative soybean tissue-specific promoters include AR-Pro1, AR-Pro2, AR-Pro3, AR-Pro4, AR-Pro5, AR-Pro6, AR-Pro7, AR-Pro8, and AR-Pro9.

[0256] In some embodiments, the plant is a seed-specific promoter. In some embodiments, the seed-specific promoter is selected from the group consisting of PvPhas, BnNap, AtOlel, GmSeed2, GmSeed3, GmSeed5, GmSeed6, GmSeed7, GmSeed8, GmSeed10, GmSeed11, GmSeed12, pBCON, GmCEP1-L, GmTHIC, GmBg7S1, GmGRD, GmOLEA, GmOLER, Gm2S-1, and GmBBld-II. In some embodiments, the seed-specific promoter is PvPhas and comprises the sequence of SEQ ID NO: 18, or a sequence at least 90%, at least 95%, at least 96%, at least 97%, at least 98%, or at least 99% identical thereto. In some embodiments, the seed-specific promoter is GmSeed2 and comprises the sequence of SEQ ID NO: 19, or a sequence at least 90%, at least 95%, at least 96%, at least 97%, at least 98%, or at least 99% identical thereto. In some embodiments, the promoter is a Cauliflower Mosaic Virus (CaMV) 35S promoter.

[0257] In some embodiments, the promoter is a soybean polyubiquitin (Gmubi) promoter, a soybean heat shock protein 90-like (GmHSP90L) promoter, a soybean Ethylene Response Factor (GmERF) promoter. In some embodiments, the promoter is a constitutive soybean promoter derived from GmScreamMl, GmScreamM4, GmScreamM8 genes or GmubiXL genes.

[0258] In some embodiments, the 5′ UTR is selected from the group consisting of Arc5′UTR and glnB1UTR. In some embodiments, the 5′ untranslated region is Arc5′UTR and comprises the sequence of SEQ ID NO: 20, or a sequence at least 90%, at least 95%, at least 96%, at least 97%, at least 98%, or at least 99% identical thereto.

[0259] In some embodiments, the terminator sequence is isolated or derived from a gene encoding Nopaline synthase, Arc5-1, an Extensin, Rb7 matrix attachment region, a Heat shock protein, Ubiquitin 10, Ubiquitin 3, and M6 matrix attachment region. In some embodiments, the terminator sequence is isolated or derived from a Nopaline synthase gene and comprises the sequence of SEQ ID NO: 22, or a sequence at least 90%, at least 95%, at least 96%, at least 97%, at least 98%, or at least 99% identical thereto.

[0260] In some embodiments, the nucleic acid comprises a first terminator sequence and a second terminator sequence (i.e., a dual terminator). In some embodiments, the dual terminator is EU:Rb7. In some embodiments, the dual terminator is AtHSP:AtUbi10. In some embodiments, the dual terminator is EU:StUbi3. In some embodiments, the dual terminator is EU:TM6.

[0261] In some embodiments, the dual terminator is EU:Rb7 and comprises the sequence of SEQ ID NO: 138, or a sequence at least 90% at least 95%, at least 96%, at least 97%, at least 98%, or at least 99% identical thereto.

[0262] In some embodiments, the dual terminator is AtHSP:AtUbi10 and comprises the sequence of SEQ ID NO: 141, or a sequence at least 90% at least 95%, at least 96%, at least 97%, at least 98%, or at least 99% identical thereto.

[0263] In some embodiments, the dual terminator is EU:StUbi3 and comprises the sequence of SEQ ID NO: 144, or a sequence at least 90% at least 95%, at least 96%, at least 97%, at least 98%, or at least 99% identical thereto.

[0264] In some embodiments, the dual terminator is EU:TM6 and comprises the sequence of SEQ ID NO: 146, or a sequence at least 90% at least 95%, at least 96%, at least 97%, at least 98%, or at least 99% identical thereto.

[0265] In some embodiments, the nucleic acid comprises a 3′ UTR. For example, the 3′ untranslated region may beArc5-1 and comprise SEQ ID NO: 21, or a sequence at least 90%, at least 95%, at least 96%, at least 97%, at least 98%, or at least 99% identical thereto.

[0266] In some embodiments the nucleic acid comprises a gene encoding a selectable marker. One illustrative selectable marker gene for plant transformation is the neomycin phosphotransferase II (nptll) gene, isolated from transposon Tn5, which, when placed under the control of plant regulatory signals, confers resistance to kanamycin. Another exemplary marker gene is the hygromycin phosphotransferase gene which confers resistance to the antibiotic hygromycin. In some embodiments, the selectable marker is of bacterial origin and confers resistance to antibiotics such as gentamycin acetyl tranSferase, streptomycin phosphotransferase, and aminoglycoside-3′-adenyl transferase, the bleomycin resistance determinant. In some embodiments, the selectable marker genes confer resistance to herbicides such as glyphosate, glufosinate or bromoxynil. In some embodiments, the selectable marker is mouse dihydrofolate reductase, plant 5-enolpyruvylshikimate-3-phosphate synthase and plant acetolactate synthase. In some embodiments, the selectable marker is acetolactate synthase (e.g., AtCsr1.2).

[0267] In some embodiments, a nucleic acid comprises an endoplasmic reticulum retention signal. For example, in some embodiments, a nucleic acid comprises a KDEL sequence (SEQ ID NO: 23). In some embodiments, the nucleic acid may comprise an endoplasmic reticulum retention signal selected from any one of CSEQ ID NO: 23-70.

[0268] Shown in Table 9 are exemplary promoters, 5′ UTRs, signal peptides, and terminators that may be used in the nucleic acids of the disclosure.

TABLE 9
Promoters, 5′ UTRs, signal peptides and terminators

| | | | | Illustrative |
|---|---|---|---|---|
| | | | | Accession No. |
| | | | | (Glyma, |
| Type | Name | Description | Native Species | GenBank) |
| Promoter | PvPhas | Phaseolin-1 (aka β- | Common bean | J01263.1 |
| | | phaseolin) | (Phaseolus | |
| | | | vulgaris) | |
| | BnNap | Napin-1 | Rapeseed | J02798.1 |
| | | | (Brassica napus) | |
| | AtOle1 | Oleosin-1 (Ole1) | Arabidopsis | X62353.1, |
| | | | (Arabidopsis | AT4G25140 |
| | | | thaliana) | |
| | GmSeed2 | Gy1 (Glycinin 1) | Soybean | Glyma.03G163500 |
| | | | (Glycine max) | |
| | GmSeed3 | cysteine protease | Soybean | Glyma.08G116300 |
| | | | (Glycine max) | |
| | GmSeed5 | Gy5 (Glycinin 5) | Soybean | Glyma.13G123500 |
| | | | (Glycine max) | |
| | GmSeed6 | Gy4 (Glycinin 4) | Soybean | Glyma.10G037100 |
| | | | (Glycine max) | |
| | GmSeed7 | Kunitz trypsin protease | Soybean | Glyma.01G095000 |
| | | inhibitor | (Glycine max) | |
| | GmSeed8 | Kunitz trypsin protease | Soybean | Glyma.08G341500 |
| | | inhibitor | (Glycine max) | |
| | GmSeed10 | Legume Lectin | Soybean | Glyma.02G012600 |
| | | Domain | (Glycine max) | |
| | GmSeed11 | β-conglycinin a | Soybean | Glyma.20G148400 |
| | | subunit | (Glycine max) | |
| | GmSeed12 | β-conglycinin a′ | Soybean | Glyma.10G246300 |
| | | subunit | (Glycine max) | |
| | pBCON | β-conglycinin β | Soybean | Glyma.20G148200 |
| | | subunit | (Glycine max) | |
| | GmCEP1-L | KDEL-tailed cysteine | Soybean | Glyma06g42780 |
| | | endopeptidase CEP1- | (Glycine max) | |
| | | like | | |
| | GmTHIC | phosphomethylpyrimidine | Soybean | Glyma11g26470 |
| | | synthase | (Glycine max) | |
| | GmBg7S1 | Basic 7S globulin | Soybean | Glyma03g39940 |
| | | precursor | (Glycine max) | |
| | GmGRD | glucose and ribitol | Soybean | Glyma07g38790 |
| | | dehydrogenase-like | (Glycine max) | |
| | GmOLEA | Oleosin isoform A | Soybean | Glyma.19g063400 |
| | | | (Glycine max) | |
| | GmOLEB | Oleosin isoform B | Soybean | Glyma.16g071800 |
| | | | (Glycine max) | |
| | Gm2S-1 | 2S albumin | Soybean | Glyma13g36400 |
| | | | (Glycine max) | |
| | GmBBId-II | Bowman-Birk protease | Soybean | Glyma16g33400 |
| | | inhibitor | (Glycine max) | |
| 5′UTR | Arc5′UTR | arc5-1 gene | Phaseolus | J01263.1 |
| | | | vulgaris | |
| | glnB1UTR | 65 bp of native | Soybean | AF301590.1 |
| | | glutamine synthase | (Glycine max) | |
| Signal peptide | GmSCB1 | Seed coat BURP | Soybean | Glyma07g28940.1 |
| | | domain protein | (Glycine max) | |
| | StPat21 | Patatin | Tomato | CAA27588 |
| | | | (Solanum | |
| | | | lycopersicum) | |
| | 2Sss | 2S albumin | Soybean | Glyma13g36400 |
| | | | (Glycine max) | |
| | Sig2 | Glycinin G1 N- | Soybean | Glyma.03G163500 |
| | | terminal peptide | (Glycine max) | |
| | Sig12 | Beta-conglycinin alpha | Soybean | Glyma.10G246300 |
| | | prime subunit N- | (Glycine max) | |
| | | terminal peptide | | |
| | Sig8 | Kunitz trypsin | Soybean | Glyma.08G341500 |
| | | inhibitor N-terminal | (Glycine max) | |
| | | peptide | | |
| | Sig10 | Lectin N-terminal | Soybean | Glyma.02G012600 |
| | | peptide from Glycine | (Glycine max) | |
| | | max | | |
| | Sig11 | Beta-conglycinin alpha | Soybean | Glyma.20G148400 |
| | | subunit N-terminal | (Glycine max) | |
| | | peptide | | |
| | Coixss | Alpha-coixin N- | Coix lacryma- | |
| | | terminal peptide from | job | |
| | | Coix lacryma-job | | |
| | KDEL | C-terminal amino acids | Phaseolus | |
| | | of sulfhydryl | vulgaris | |
| | | endopeptidase | | |
| Terminator | NOS | Nopaline synthase | Agrobacterium | |
| | | gene termination | tumefaciens | |
| | | sequence | | |
| | ARC | arc5-1 gene | Phaseolus | J01263.1 |
| | | termination sequence | vulgaris | |
| | EU | Extensin termination | Nicotiana | |
| | | sequence | tabacum | |
| | Rb7 | Rb7 matrix attachment | Nicotiana | |
| | | region termination | tabacum | |
| | | sequence | | |
| | HSP or AtHSP | Heat shock termination | Arabidopsis | |
| | | sequence | thaliana | |
| | AtUbi10 | Ubiquitin 10 | Arabidopsis | |
| | | termination sequence | thaliana | |
| | Stubi3 | Ubiquitin 3 | Solanum | |
| | | termination | tuberosum | |
| | TM6 | M6 matrix attachment | Nicotiana | |
| | | region termination | tabacum | |
| | | sequence | | |
| Dual | EU:Rb7 | Extensin termination | Nicotiana | |
| terminators | | sequence:Rb7 matrix | tabacum | |
| | | attachment region | | |
| | | termination sequence | | |
| | AtHSP:AtUbi10 | Heat shock termination | Arabidopsis | |
| | | sequence:Ubiquitin 10 | thaliana | |
| | | termination sequence | | |
| | EU:StUbi3 | Rb7 matrix attachment | Nicotiana | |
| | | region termination | tabacum, | |
| | | sequence:Ubiquitin 3 | Solanum | |
| | | termination | tuberosum | |
| | EU:TM6 | Rb7 matrix attachment | Nicotiana | |
| | | region termination | tabacum | |
| | | sequence:M6 matrix | | |
| | | attachment region | | |
| | | termination sequence | | |

[0269] Illustrative nucleic acids of the disclosure are provided in FIG. 1A-FIG. 1P and FIG. 2A-FIG. 2P. In some embodiments a nucleic acid comprises, from 5′ to 3′, a promoter, a 5′UTR, a sequence encoding an unstructured milk protein, a sequence encoding a structured mammalian protein, an endoplasmic reticulum retention signal, and a terminator (See, e.g., FIG. 1A). In some embodiments a nucleic acid comprises, from 5′ to 3′, a promoter, a 5′UTR, a sequence encoding an unstructured milk protein, a sequence encoding a linker, a sequence encoding a structured mammalian protein, an endoplasmic reticulum retention signal, and a terminator (See, e.g., FIG. 1B). In some embodiments a nucleic acid comprises, from 5′ to 3′, a promoter, a 5′UTR, a sequence encoding an unstructured milk protein, a sequence encoding a linker, a sequence encoding a structured mammalian protein, and a terminator (See, e.g., FIG. 1C). In some embodiments a nucleic acid comprises, from 5′ to 3′, a promoter, a 5′UTR, a sequence encoding an unstructured milk protein, a sequence encoding a structured mammalian protein, and a terminator (See, e.g., FIG. 1D). In some embodiments a nucleic acid comprises, from 5′ to 3′, a promoter, a 5′UTR, a sequence encoding a structured mammalian protein, a sequence encoding an unstructured milk protein, an endoplasmic reticulum retention signal, and a terminator (See, e.g., FIG. 1E). In some embodiments a nucleic acid comprises, from 5′ to 3′, a promoter, a 5′UTR, a sequence encoding a structured mammalian protein, a sequence encoding a linker, a sequence encoding an unstructured milk protein, an endoplasmic reticulum retention signal, and a terminator (See, e.g., FIG. 1F). In some embodiments a nucleic acid comprises, from 5′ to 3′, a promoter, a 5′UTR, a sequence encoding a structured mammalian protein, a sequence encoding a linker, a sequence encoding an unstructured milk protein, and a terminator (See, e.g., FIG. 1G). In some embodiments a nucleic acid comprises, from 5′ to 3′, a promoter, a 5′UTR, a sequence encoding a structured mammalian protein, a sequence encoding an unstructured milk protein, and a terminator (See, e.g., FIG. 1H). In some embodiments a nucleic acid comprises, from 5′ to 3′, a promoter, a 5′UTR, a sequence encoding a signal peptide, a sequence encoding an unstructured milk protein, a sequence encoding a structured mammalian protein, an endoplasmic reticulum retention signal, and a terminator (See, e.g., FIG. 1I). In some embodiments a nucleic acid comprises, from 5′ to 3′, a promoter, a 5′UTR, a sequence encoding a signal peptide, a sequence encoding an unstructured milk protein, a sequence encoding a linker, a sequence encoding a structured mammalian protein, an endoplasmic reticulum retention signal, and a terminator (See, e.g., FIG. 1J). In some embodiments a nucleic acid comprises, from 5′ to 3′, a promoter, a 5′UTR, a sequence encoding a signal peptide, a sequence encoding an unstructured milk protein, a sequence encoding a linker, a sequence encoding a structured mammalian protein, and a terminator (See, e.g., FIG. 1K). In some embodiments a nucleic acid comprises, from 5′ to 3′, a promoter, a 5′UTR, a sequence encoding a signal peptide, a sequence encoding an unstructured milk protein, a sequence encoding a structured mammalian protein, and a terminator (See, e.g., FIG. 1L). In some embodiments a nucleic acid comprises, from 5′ to 3′, a promoter, a 5′UTR, a sequence encoding a signal peptide, a sequence encoding a structured mammalian protein, a sequence encoding an unstructured milk protein, an endoplasmic reticulum retention signal, and a terminator (See, e.g., FIG. 1M). In some embodiments a nucleic acid comprises, from 5′ to 3′, a promoter, a 5′UTR, a sequence encoding a signal peptide, a sequence encoding a structured mammalian protein, a sequence encoding a linker, a sequence encoding an unstructured milk protein, an endoplasmic reticulum retention signal, and a terminator (See, e.g., FIG. 1N). In some embodiments a nucleic acid comprises, from 5′ to 3′, a promoter, a 5′UTR, a sequence encoding a signal peptide, a sequence encoding a structured mammalian protein, a sequence encoding a linker, a sequence encoding an unstructured milk protein, and a terminator (See, e.g., FIG. 1O). In some embodiments a nucleic acid comprises, from 5′ to 3′, a promoter, a 5′UTR, a sequence encoding a signal peptide, a sequence encoding a structured mammalian protein, a sequence encoding an unstructured milk protein, and a terminator (See, e.g., FIG. 1P).

[0270] In some embodiments a nucleic acid comprises, from 5′ to 3′, a promoter, a 5′UTR, a sequence encoding a signal peptide, a sequence encoding first protein, a sequence encoding a second protein, an endoplasmic reticulum retention signal, and a terminator (See, e.g., FIG. 2A). In some embodiments a nucleic acid comprises, from 5′ to 3′, a promoter, a 5′UTR, a sequence encoding a signal peptide, a sequence encoding first protein, a sequence encoding a linker, a sequence encoding a second protein, an endoplasmic reticulum retention signal, and a terminator (See, e.g., FIG. 2B). In some embodiments a nucleic acid comprises, from 5′ to 3′, a promoter, a 5′UTR, a sequence encoding a signal peptide, a sequence encoding a first protein, a sequence encoding a linker, a sequence encoding a second protein, and a terminator (See, e.g., FIG. 2C). In some embodiments a nucleic acid comprises, from 5′ to 3′, a promoter, a 5′UTR, a sequence encoding a signal peptide, a sequence encoding a first protein, a sequence encoding a second protein, and a terminator (See, e.g., FIG. 2D). In some embodiments a nucleic acid comprises, from 5′ to 3′, a promoter, a 5′UTR, a sequence encoding a signal peptide, a sequence encoding a second protein, a sequence encoding a first protein, an endoplasmic reticulum retention signal, and a terminator (See, e.g., FIG. 2E). In some embodiments a nucleic acid comprises, from 5′ to 3′, a promoter, a 5′UTR, a sequence encoding a signal peptide, a sequence encoding a second protein, a sequence encoding a linker, a sequence encoding a first protein, an endoplasmic reticulum retention signal, and a terminator (See, e.g., FIG. 2F). In some embodiments a nucleic acid comprises, from 5′ to 3′, a promoter, a 5′UTR, a sequence encoding a signal peptide, a sequence encoding a second protein, a sequence encoding a linker, a sequence encoding a first protein, and a terminator (See, e.g., FIG. 2G). In some embodiments a nucleic acid comprises, from 5′ to 3′, a promoter, a 5′UTR, a sequence encoding a signal peptide, a sequence encoding a second protein, a sequence encoding first protein, and a terminator (See, e.g., FIG. 2H).

[0271] In some embodiments a nucleic acid comprises, from 5′ to 3′, a promoter, a 5′UTR, a sequence encoding a first protein, a sequence encoding a second protein, an endoplasmic reticulum retention signal, and a terminator (See, e.g., FIG. 2I). In some embodiments a nucleic acid comprises, from 5′ to 3′, a promoter, a 5′UTR, a sequence encoding a first protein, a sequence encoding a linker, a sequence encoding a second protein, an endoplasmic reticulum retention signal, and a terminator (See, e.g., FIG. 2J). In some embodiments a nucleic acid comprises, from 5′ to 3′, a promoter, a 5′UTR, a sequence encoding a first protein, a sequence encoding a linker, a sequence encoding a second protein, and a terminator (See, e.g., FIG. 2K). In some embodiments a nucleic acid comprises, from 5′ to 3′, a promoter, a 5′UTR, a sequence encoding a first protein, a sequence encoding a second protein, and a terminator (See, e.g., FIG. 2L). In some embodiments a nucleic acid comprises, from 5′ to 3′, a promoter, a 5′UTR, a sequence encoding a second protein, a sequence encoding a first protein, an endoplasmic reticulum retention signal, and a terminator (See, e.g., FIG. 2M). In some embodiments a nucleic acid comprises, from 5′ to 3′, a promoter, a 5′UTR, a sequence encoding a second protein, a sequence encoding a linker, a sequence encoding a first protein, an endoplasmic reticulum retention signal, and a terminator (See, e.g., FIG. 2N). In some embodiments a nucleic acid comprises, from 5′ to 3′, a promoter, a 5′UTR, a sequence encoding a second protein, a sequence encoding a linker, a sequence encoding a first protein, and a terminator (See, e.g., FIG. 2O). In some embodiments a nucleic acid comprises, from 5′ to 3′, a promoter, a 5′UTR, a sequence encoding a second protein, a sequence encoding a first protein, and a terminator (See, e.g., FIG. 2P).

[0272] In some embodiments, the nucleic acid comprises an expression cassette comprising a OKC1-T:OLG1 (Optimized Kappa Casein version 1:beta-lactoglobulin version 1) fusion driven by PvPhas promoter fused with arc5′UTR:sig10, followed by the ER retention signal (KDEL) and the 3′UTR of the arc5-1 gene, “arc-terminator” (See, e.g., FIG. 4). In some embodiments, the nucleic acid comprises SEQ ID NO: 72.

[0273] In some embodiments, the nucleic acid comprises an expression cassette comprising a OBC-T2:FM:OLG1 (Optimized Beta Casein Truncated version 2:Chymosin cleavage site:beta-lactoglobulin version 1) fusion driven by PvPhas promoter fused with arc5′UTR:sig10, followed by the 3′UTR of the arc5-1 gene, “arc-terminator” (See, e.g., FIG. 5). In some embodiments, the nucleic acid comprises SEQ ID NO: 74. The Beta Casein is “truncated” in that the bovine secretion signal is removed and replaced with a plant targeting signal.

[0274] In some embodiments, the nucleic acid comprises an expression cassette comprising a OaS1-T:FM:OLG1 (Optimized Alpha S1 Casein Truncated version 1:Chymosin cleavage site:beta-lactoglobulin version 1) fusion driven by PvPhas promoter fused with arc5′UTR:sig10, followed by the 3′UTR of the arc5-1 gene, “arc-terminator” (See, e.g., FIG. 6). In some embodiments, the nucleic acid comprises SEQ ID NO: 76. The Alpha S1 is “truncated” in that the bovine secretion signal is removed and replaced with a plant targeting signal.

[0275] In some embodiments, the nucleic acid comprises an expression cassette comprising a para-OKC1-T:FM:OLG1:KDEL (Optimized paraKappa Casein version 1:Chymosin cleavage site:beta-lactoglobulin version 1) fusion driven by PvPhas promoter fused with arc5′UTR:sig 10, followed by the ER retention signal (KDEL) and the 3′UTR of the arc5-1 gene, “arc-terminator” (See, e.g., FIG. 7). In some embodiments, the nucleic acid comprises SEQ ID NO: 78.

[0276] In some embodiments, the nucleic acid comprises an expression cassette comprising a para-OKC1-T:FM:OLG1 (Optimized paraKappa Casein version 1:Chymosin cleavage site:beta-lactoglobulin version 1) fusion driven by PvPhas promoter fused with arc5′UTR:sig 10, followed by the 3′UTR of the arc5-1 gene, “arc-terminator” (See, e.g., FIG. 8). In some embodiments, the nucleic acid comprises SEQ ID NO: 80.

[0277] In some embodiments, the nucleic acid comprises an expression cassette comprising a OKC1-T-OLG1 (Optimized Kappa Casein version 1:beta-lactoglobulin version 1) fusion that is driven by the promoter and signal peptide of glycinin 1 (GmSeed2:sig2) followed by the ER retention signal (KDEL) and the nopaline synthase gene termination sequence (nos term) (See, e.g., FIG. 9). In some embodiments, the nucleic acid comprises SEQ ID NO: 82.

[0278] In some embodiments, a nucleic acid encoding a fusion protein comprises the sequence of any one of SEQ ID NO: 72, 74, 76, 78, 80, 82, 134, or 136. In some embodiments, a nucleic acid encoding a fusion protein comprises the sequence of any one of SEQ ID NO: 615, 617, 619, 621, 623, 625, 627, 629, 631, 633, 635, 637, 639, 641, 643, 645, 647, 649, 651, 653, 655, 657, 659, 661, 663, 792, 794, 796, or 798.

[0279] In some embodiments, the nucleic acids are codon optimized for expression in a host cell. Codon optimization is a process used to improve gene expression and increase the translational efficiency of a gene of interest by accommodating codon bias of the host organism (i.e., the organism in which the gene is expressed). Codon-optimized mRNA sequences that are produced using different programs or approaches can vary because different codon optimization strategies differ in how they quantify codon usage and implement codon changes. Some approaches use the most optimal (frequently used) codon for all instances of an amino acid, or a variation of this approach. Other approaches adjust codon usage so that it is proportional to the natural distribution of the host organism. These approaches include codon harmonization, which endeavors to identify and maintain regions of slow translation thought to be important for protein folding. Alternative approaches involve using codons thought to correspond to abundant tRNAs, using codons according to their cognate tRNA concentrations, selectively replacing rare codons, or avoiding occurrences of codon-pairs that are known to translate slowly. In addition to approaches that vary in the extent to which codon usage is considered as a parameter, there are hypothesis-free approaches that do not consider this parameter. Algorithms for performing codon optimization are known to those of skill in the art and are widely available on the Internet.

[0280] In some embodiments the nucleic acids are codon optimized for expression in a plant species. The plant species may be, for example, a monocot or a dicot. In some embodiments, the plant species is a dicot species selected from soybean, lima bean, Arabidopsis, tobacco, rice, maize, barley, sorghum, wheat and/or oat. In some embodiments, the plant species is soybean.

[0281] In some embodiments, the nucleic acids are codon optimized for expression in a eukaryotic microorganism. The species may be, for example, Saccharomyces spp., Kluyveromyces spp., Pichia spp., Aspergillus spp., Tetrahymena spp., Yarrowla spp., Hansenula spp., Blastobotrys spp., Candida spp., Zygosaccharomyces spp., Debrayomyces spp., Fusarium spp., and Trichoderma spp.

[0282] In some embodiments, the nucleic acids are codon optimized for expression in a bacterial cell. The bacterial species may be, for example, Escherichia coli, Caulobacter crescentus, Rodhobacter sphaeroides, Pseudoalteromonas haloplanktis, Shewanella sp., Pseudomonas putida, P. aeruginosa, P. fluorescens, Halomonas elongate, Chromohalobacter salexigens, Streptomyces lividans, S. griseus, Nocardia lactamdurans, Mycobacterium smegmatis, Corynebacterium glutamicum, C. ammoniagenes, Brevibacterium lactofermentum, Bacillus subtilis, B. brevis, B. megaterium, B. licheniformis, B. amyloliquefaciens, Lactococcus lactis, L. plantarum, L. casei, L. reuteri, L. gasseri.

[0283] In some embodiments, a nucleic acid may encode more than one fusion protein. For example, in some embodiments, a nucleic acid may encode two, three, four, five, six, seven, eight, nine, or ten fusion proteins. Expression of each fusion protein in the nucleic acid may be driven by a separate promoter. For example, in some embodiments, a nucleic acid comprises a first promoter configured to drive expression of a sequence encoding a first fusion protein, and a second promoter configured to drive expression of a sequence encoding a second fusion protein. In some embodiments, a nucleic acid comprises a first promoter operably linked to a sequence encoding a first fusion protein, and a second promoter operably linked to a sequence encoding a second fusion protein.

[0284] The nucleic acids of the disclosure may be contained within a vector. The vector may be, for example, a viral vector or a non-viral vector. In some embodiments, the non-viral vector is a plasmid, such as an Agrobacterium Ti plasmid. In some embodiments, the non-viral vector is a lipid nanoparticle.

[0285] In some embodiments, the vector comprises a nucleic acid encoding multiple fusion proteins. For example, in some embodiments, a vector comprises a nucleic acid comprising a sequence encoding a first fusion protein and a sequence encoding a second fusion protein. A first promoter may drive expression of the first fusion protein, and a second promoter may drive expression of the second fusion protein. In some embodiments, the first promoter and the second promoter are the same. In some embodiments, the first promoter and the second promoter are different. In some embodiments, a vector comprises a nucleic acid comprising a sequence encoding a first fusion protein, a sequence encoding a second fusion protein, and a sequence encoding a third fusion protein. A first promoter may drive expression of the first fusion protein, a second promoter may drive expression of the second fusion protein, and a third promoter may drive expression of the third fusion protein. In some embodiments, each of the first, second, and third promoter are different. In some embodiments, at least two of the first, second, and third promoter are different. In some embodiments, the first, second, and third promoter are the same.

[0286] In some embodiments, a vector comprises a nucleic acid encoding a recombinant fusion protein, wherein the recombinant fusion protein comprises: (i) an unstructured milk protein, and (ii) a structured animal (e.g., mammalian or avian) protein. In some embodiments, the vector is an Agrobacterium Ti plasmid. In some embodiments, a vector comprises a nucleic acid encoding a recombinant fusion protein, wherein the recombinant fusion protein comprises: (1) a milk protein, and (2) a second protein. In some embodiments, the second protein is also a milk protein. In some embodiments, the second protein is beta-lactoglobulin. In some embodiments, the second protein is a mammalian or avian protein. In some embodiments, the vector is an Agrobacterium Ti plasmid. In some embodiments, the vector is a vector for use with an Agrobacterium binary vector transformation system. In some embodiments, the fusion protein is cleaved to liberate the milk protein and the second protein before either one is used to prepare a composition as described herein (See, e.g., FIG. 13). The fusion protein may be cleaved, for example, with one or more proteases.

[0287] In some embodiments, a method for expressing a casein protein (including fusion proteins comprising a casein protein) in a plant comprises contacting the plant with a vector of the disclosure. In some embodiments, a method for expression of a casein protein in a plant comprises contacting the plant with an Agrobacterium cell comprising a vector of the disclosure. In some embodiments, the method comprises maintaining the plant or part thereof under conditions in which the fusion protein is expressed.

[0288] In some embodiments, a method for expressing a fusion protein in a plant comprises contacting the plant with a vector of the disclosure. In some embodiments, the method comprises maintaining the plant or part thereof under conditions in which the fusion protein is expressed.

### Plants Expressing Fusion Proteins

[0289] Also provided herein are transgenic plants expressing one or more fusion proteins of the disclosure. In some embodiments, the transgenic plants stably express the fusion protein. In some embodiments, the transgenic plants transiently express the fusion protein. In some embodiments, the transgenic plants stably express the fusion protein in the plant in an amount of at least 1% per the total protein weight of the soluble protein extractable from the plant. For example, the transgenic plants may stably express the fusion protein in an amount of at least 1%, at least 1.5%, at least 2%, at least 2.5%, at least 3%, at least 3.5%, at least 4%, at least 4.5%, at least 5%, at least 5.5%, at least 6%, at least 6.5%, at least 7%, at least 7.5%, at least 8%, at least 8.5%, at least 9%, at least 9.5%, at least 10%, at least 10.5%, at least 11%, at least 11.5%, at least 12%, at least 12.5%, at least 13%, at least 13.5%, at least 14%, at least 14.5%, at least 15%, at least 15.5%, at least 16%, at least 16.5%, at least 17%, at least 17.5%, at least 18%, at least 18.5%, at least 19%, at least 19.5%, at least 20%, or more of total protein weight of soluble protein extractable from the plant (or specific plant part, such as a bean). In some embodiments, the transgenic plants stably express a milk protein (e.g., within a fusion protein), wherein the milk protein expresses in an amount of at least 1%, at least 1.5%, at least 2%, at least 2.5%, at least 3%, at least 3.5%, at least 4%, at least 4.5%, at least 5%, at least 5.5%, at least 6%, at least 6.5%, at least 7%, at least 7.5%, at least 8%, at least 8.5%, at least 9%, at least 9.5%, at least 10%, at least 10.5%, at least 11%, at least 11.5%, at least 12%, at least 12.5%, at least 13%, at least 13.5%, at least 14%, at least 14.5%, at least 15%, at least 15.5%, at least 16%, at least 16.5%, at least 17%, at least 17.5%, at least 18%, at least 18.5%, at least 19%, at least 19.5%, at least 20%, or more of total protein weight of soluble protein extractable from the plant (or specific plant part, such as a bean).

[0290] In some embodiments, the transgenic plants stably express the fusion protein in an amount of less than about 1% of the total protein weight of soluble protein extractable from the plant. In some embodiments, the transgenic plants stably express the fusion protein in the range of about 1% to about 2%, about 3% to about 4%, about 4% to about 5%, about 5% to about 6%, about 6% to about 7%, about 7% to about 8%, about 8% to about 9%, about 9% to about 10%, about 10% to about 11%, about 11% to about 12%, about 12% to about 13%, about 13% to about 14%, about 14% to about 15%, about 15% to about 16%, about 16% to about 17%, about 17%, to about 18%, about 18% to about 19%, about 19% to about 20%, or more than about 20% of the total protein weight of soluble protein extractable from the plant (or specific plant part, such as a bean).

[0291] In some embodiments, the transgenic plants stably express a milk protein (e.g., within a fusion protein) in the range of about 1% to about 2%, about 3% to about 4%, about 4% to about 5%, about 5% to about 6%, about 6% to about 7%, about 7% to about 8%, about 8% to about 9%, about 9% to about 10%, about 10% to about 11%, about 11% to about 12%, about 12% to about 13%, about 13% to about 14%, about 14% to about 15%, about 15% to about 16%, about 16% to about 17%, about 17%, to about 18%, about 18% to about 19%, about 19% to about 20%, or more than about 20% of the total protein weight of soluble protein extractable from the plant (or specific plant part, such as a bean).

[0292] In some embodiments, the transgenic plant stably expresses the fusion protein (or a milk protein within the fusion) in an amount in the range of about 0.5% to about 3%, about 1% to about 4%, about 1% to about 5%, about 2% to about 5%, about 1% to about 10%, about 2% to about 10%, about 3% to about 10%, about 5 to about 12%, about 4% to about 10%, or about 5% to about 10%, about 4% to about 8%, about 5% to about 15%, about 5% to about 18%, about 10% to about 20%, or about 1% to about 20% of the total protein weight of soluble protein extractable from the plant (or specific plant part, such as a bean).

[0293] In some embodiments, the fusion protein (or a milk protein within the fusion) is expressed at a level at least 2-fold higher than a milk protein expressed individually (i.e., expressed alone, not as part of a fusion protein) in a plant. For example, in some embodiments, the fusion protein is expressed at a level at least 2-fold, at least 2.5-fold, at least 3-fold, at least 3.5-fold, at least 4-fold, at least 4.5-fold, at least 5-fold, at least 5.5-fold, at least 6-fold, at least 7-fold, at least 7.5-fold, at least 8-fold, at least 8.5-fold, at least 9-fold, at least 9.5-fold, at least 10-fold, at least 25-fold, at least 50-fold, or at least 100-fold higher than a milk protein expressed individually in a plant.

[0294] In some embodiments, the fusion protein allows for accumulation of a casein protein in the plant at least 2-fold higher than a casein protein expressed individually (i.e., expressed alone, not as a part of a fusion protein) in a plant. For example, in some embodiments, the casein protein expressed in a fusion protein accumulates in the plant at least 2-fold, at least 2.5-fold, at least 3-fold, at least 3.5-fold, at least 4-fold, at least 4.5-fold, at least 5-fold, at least 5.5-fold, at least 6-fold, at least 7-fold, at least 7.5-fold, at least 8-fold, at least 8.5-fold, at least 9-fold, at least 9.5-fold, at least 10-fold, at least 25-fold, at least 50-fold, or at least 100-fold higher than a casein protein expressed individually.

[0295] In some embodiments, the fusion protein is stably expressed in the plant in an amount of 1% or higher per the total protein weight of the soluble protein extractable from the plant (or specific plant part, such as a bean). In some embodiments, the fusion protein is stably expressed in the plant in an amount of 2% or higher per the total protein weight of the soluble protein extractable from the plant (or specific plant part, such as a bean). In some embodiments, the fusion protein is stably expressed in the plant in an amount of 3% or higher per the total protein weight of the soluble protein extractable from the plant (or specific plant part, such as a bean). In some embodiments, the fusion protein is stably expressed in the plant in an amount of 4% or higher per the total protein weight of the soluble protein extractable from the plant (or specific plant part, such as a bean). In some embodiments, the fusion protein is stably expressed in the plant in an amount of 5% or higher per the total protein weight of the soluble protein extractable from the plant (or specific plant part, such as a bean). In some embodiments, the fusion protein is stably expressed in the plant in an amount of 6% or higher per the total protein weight of the soluble protein extractable from the plant (or specific plant part, such as a bean). In some embodiments, the fusion protein is stably expressed in the plant in an amount of 7% or higher per the total protein weight of the soluble protein extractable from the plant (or specific plant part, such as a bean). In some embodiments, the fusion protein is stably expressed in the plant in an amount of 8% or higher per the total protein weight of the soluble protein extractable from the plant (or specific plant part, such as a bean). In some embodiments, the fusion protein is stably expressed in the plant in an amount of 9% or higher per the total protein weight of the soluble protein extractable from the plant (or specific plant part, such as a bean). In some embodiments, the fusion protein is stably expressed in the plant in an amount of 10% or higher per the total protein weight of the soluble protein extractable from the plant (or specific plant part, such as a bean). In some embodiments, the fusion protein is stably expressed in the plant in an amount of 110% or higher per the total protein weight of the soluble protein extractable from the plant (or specific plant part, such as a bean). In some embodiments, the fusion protein is stably expressed in the plant in an amount of 12% or higher per the total protein weight of the soluble protein extractable from the plant (or specific plant part, such as a bean). In some embodiments, the fusion protein is stably expressed in the plant in an amount of 13% or higher per the total protein weight of the soluble protein extractable from the plant (or specific plant part, such as a bean). In some embodiments, the fusion protein is stably expressed in the plant in an amount of 14% or higher per the total protein weight of the soluble protein extractable from the plant (or specific plant part, such as a bean). In some embodiments, the fusion protein is stably expressed in the plant in an amount of 15% or higher per the total protein weight of the soluble protein extractable from the plant (or specific plant part, such as a bean). In some embodiments, the fusion protein is stably expressed in the plant in an amount of 16% or higher per the total protein weight of the soluble protein extractable from the plant (or specific plant part, such as a bean). In some embodiments, the fusion protein is stably expressed in the plant in an amount of 17% or higher per the total protein weight of the soluble protein extractable from the plant (or specific plant part, such as a bean). In some embodiments, the fusion protein is stably expressed in the plant in an amount of 18% or higher per the total protein weight of the soluble protein extractable from the plant (or specific plant part, such as a bean). In some embodiments, the fusion protein is stably expressed in the plant in an amount of 19% or higher per the total protein weight of the soluble protein extractable from the plant. In some embodiments, the fusion protein is stably expressed in the plant in an amount of 20% or higher per the total protein weight of the soluble protein extractable from the plant (or specific plant part, such as a bean).

[0296] In some embodiments, a transformed plant comprises in its genome: a recombinant DNA construct encoding a first protein and a second protein, wherein the first protein and/or the second protein is a milk protein. In some embodiments, a transformed plant comprises in its genome: a recombinant DNA construct encoding a first protein and a second protein, wherein the first protein is a milk protein and the second protein is a non-milk protein. In some embodiments, a transformed plant comprises in its genome a recombinant DNA construct encoding a fusion protein, wherein the fusion protein comprises a first protein and a second protein, wherein the first protein and the second protein are milk proteins. In some embodiments, a transformed plant comprises in its genome a recombinant DNA construct encoding a fusion protein, wherein the fusion protein comprises from N-terminus to C-terminus, the first protein and the second protein. In some embodiments, the fusion protein comprises, from N-terminus to C-terminus, the second protein and the first protein.

[0297] In some embodiments, a transformed plant comprises in its genome: a recombinant DNA construct encoding a fusion protein, wherein the fusion protein comprises (i) a milk protein, and (ii) an animal (e.g., mammalian or avian) protein. In some embodiments, a transformed plant comprises in its genome a recombinant DNA construct encoding a fusion protein, wherein the fusion protein comprises from N-terminus to C-terminus, the milk protein and the animal (e.g., mammalian or avian) protein. In some embodiments, the fusion protein comprises, from N-terminus to C-terminus, the animal (e.g., mammalian or avian) protein and the milk protein.

[0298] In some embodiments, a transformed plant comprises in its genome: a recombinant DNA construct encoding a fusion protein, wherein the fusion protein comprises a milk protein such as a casein protein. In some embodiments, a transformed plant comprises in its genome: a recombinant DNA construct encoding a fusion protein, wherein the fusion protein comprises a milk protein selected from α-S1 casein, α-S2 casein, β-casein, and κ-casein. In some embodiments, the milk protein is α-S1 casein. In some embodiments, the milk protein is α-S1 casein and comprises the sequence SEQ ID NO: 8, or a sequence at least 90% identical thereto. In some embodiments, the milk protein is α-S2 casein. In some embodiments, the milk protein is α-S2 casein and comprises the sequence SEQ ID NO: 84, or a sequence at least 90% identical thereto. In some embodiments, the milk protein is β-casein. In some embodiments, the milk protein is β-casein and comprises the sequence of SEQ ID NO: 6, or a sequence at least 90% identical thereto. In some embodiments, the milk protein is κ-casein. In some embodiments, the milk protein is κ-casein and comprises the sequence of SEQ ID NO: 4, or a sequence at least 90% identical thereto. In some embodiments, the milk protein is para-κ-casein. In some embodiments, the milk protein is para-κ-casein and comprises the sequence of SEQ ID NO: 2, or a sequence at least 90% identical thereto. In some embodiments, the milk protein is β-lactoglobulin. In some embodiments, the milk protein is β-lactoglobulin and comprises the sequence of SEQ ID NO: 10, or a sequence at least 90% identical thereto. In some embodiments, the milk protein is α-lactalbumin, lysozyme, lactoferrin, lactoperoxidase, or an immunoglobulin (e.g., IgA, IgG, IgM, or IgE).

[0299] In some embodiments, a transformed plant comprises in its genome: a recombinant DNA construct encoding a fusion protein, wherein the fusion protein comprises a mammalian protein selected from hemoglobin, or collagen, IgM, or IgE. In some embodiments, a transformed plant comprises in its genome: a recombinant DNA construct encoding a fusion protein, wherein the fusion protein comprises an avian protein selected from lysozyme, ovalbumin, ovotransferrin, and ovoglobulin.

[0300] In some embodiments, a transformed plant comprises in its genome: a recombinant DNA construct encoding a fusion protein, wherein the fusion protein comprises a casein protein and β-lactoglobulin. In some embodiments, a transformed plant comprises in its genome: a recombinant DNA construct encoding a fusion protein, wherein the fusion protein comprises κ-casein and β-lactoglobulin. In some embodiments, the fusion protein comprises para-κ-casein and β-lactoglobulin. In some embodiments, the fusion protein comprises β-casein and 0-lactoglobulin. In some embodiments, the fusion protein comprises α-S1 casein and 0-lactoglobulin. In some embodiments, the fusion protein comprises two, three, four, five, or six β-caseins.

[0301] In some embodiments, a transformed plant comprises in its genome: a recombinant DNA construct encoding a fusion protein; wherein the fusion protein comprises (1) κ-casein, and (ii) β-lactoglobulin. In some embodiments the fusion protein is expressed in the plant in an amount of 1% or higher per the total protein weight of the soluble protein extractable from the plant.

[0302] In some embodiments, a transformed plant comprises in its genome: a recombinant DNA construct encoding a fusion protein, wherein the fusion protein comprises a first protein and a second protein, wherein the first protein and the second protein are each casein proteins. In some embodiments, the recombinant fusion protein comprises κ-casein and para-κ-casein. In some embodiments, the recombinant fusion protein comprises κ-casein and β-casein. In some embodiments, the recombinant fusion protein comprises κ-casein and α-S1-casein. In some embodiments, the recombinant fusion protein comprises κ-casein and α-S2-casein. In some embodiments, the recombinant fusion protein comprises para-κ-casein and β-casein. In some embodiments, the recombinant fusion protein comprises para-κ-casein and α-S1-casein. In some embodiments, the recombinant fusion protein comprises para-κ-casein and α-S2-casein. In some embodiments, the recombinant fusion protein comprises β-casein and α-S1-casein. In some embodiments, the recombinant fusion protein comprises β-casein and α-S2-casein. In some embodiments, the recombinant fusion protein comprises α-S1-casein and α-S2-casein.

[0303] In some embodiments, the recombinant fusion protein comprises two or more of the same casein proteins. In some embodiments, the recombinant fusion protein comprises κ-casein and κ-casein. In some embodiments, the recombinant fusion protein comprises β-casein and β-casein. In some embodiments, the recombinant fusion protein comprises para-κ-casein and para-κ-casein. In some embodiments, the recombinant fusion protein comprises α-S1-casein and α-S1-casein. In some embodiments, the recombinant fusion protein comprises α-S2-casein and α-S2-casein.

[0304] In some embodiments, the transformed plant is a monocot. For example, in some embodiments, the plant may be a monocot selected from turf grass, maize (corn), rice, oat, wheat, barley, sorghum, orchid, iris, lily, onion, palm, and duckweed.

[0305] In some embodiments, the transformed plant is a dicot. For example, in some embodiments, the plant may be a dicot selected from Arabidopsis, tobacco, tomato, potato, sweet potato, cassava, alfalfa, lima bean, pea, chickpea, soybean, carrot, strawberry, lettuce, oak, maple, walnut, rose, mint, squash, daisy, Quinoa, buckwheat, mung bean, cow pea, lentil, lupin, peanut, fava bean, French beans (i.e., common beans), mustard, or cactus. In some embodiments, the plant is a soybean (Glycine max).

[0306] In some embodiments, the plant is a non-vascular plant selected from moss, liverwort, hornwort or algae. In some embodiments, the plant is a vascular plant reproducing from spores (e.g., a fern).

[0307] In some embodiments, the recombinant DNA construct is codon-optimized for expression in the plant. For example, in some embodiments, the recombinant DNA construct is codon-optimized for expression in a soybean plant.

[0308] The transgenic plants described herein may be generated by various methods known in the art. For example, a nucleic acid encoding a fusion protein may be contacted with a plant, or a part thereof, and the plant may then be maintained under conditions wherein the fusion protein is expressed. In some embodiments, the nucleic acid is introduced into the plant, or part thereof, using one or more methods for plant transformation known in the art, such as Agrobacterium-mediated transformation, particle bombardment-medicated transformation, electroporation, and microinjection.

[0309] In some embodiments, a method for stably expressing a recombinant fusion protein in a plant comprises (i) transforming a plant with a plant transformation vector comprising an expression cassette comprising: a sequence encoding a fusion protein, wherein the fusion protein comprises a milk protein, and an animal (e.g., mammalian or avian) protein; and (ii) growing the transformed plant under conditions wherein the recombinant fusion protein is expressed. In some embodiments, the milk protein is κ-casein. In some embodiments, the animal protein is β-lactoglobulin. In some embodiments, the milk protein is κ-casein and the animal protein is β-lactoglobulin. In some embodiments, the recombinant fusion protein is expressed in an amount of 1% or higher per the total protein weight of the soluble protein extractable from the plant.

### Casein Accumulation in Plants

[0310] As described herein, fusion proteins comprising one or more milk proteins (e.g., casein proteins) accumulate to a greater extent in plant cells than the milk proteins expressed individually (not as fusion proteins). Caseins aggregate and bind to calcium-phosphate to form micelles. Without being bound by any theory, it is believed that native plant proteases are capable of degrading caseins by cleavage at various protease recognition sites (FIG. 11A). Thus, when caseins are expressed alone (i.e., not as a fusion protein), they are degraded quickly and do not accumulate in the cells. When caseins are fused to a second protein (FIG. 11B, FIG. 11C), the second protein may partially or fully limit protease access to the cleavage site on the caseins and may reduce degradation thereof. The extent of protection may vary depending on the properties of the second protein. For example, fusion proteins comprising two caseins (e.g., homodimers or heterodimers, FIG. 11C) may be able adopt a conformation that partially or fully prevents access to one or more protease cleavage sites. Some non-casein proteins, such as beta-lactoglobulin, GFP, or lysozyme, may also partially or fully block protease access, allowing casein accumulation at high levels in the cell (FIG. 11B). Without being bound by any theory, it is believed that fusion of a casein to a second protein comprising one, two or all three of the following characteristics is able to prevent access to one or more protease cleavage sites on the casein: (i) a molecular weight of 15 kDa or higher; (ii) at least 30% hydrophobic amino acids; and/or (iii) less than about 2.5 disulfide bonds per 10 kDa molecular weight.

[0311] Protease access to cleavage sites on a casein protein may also be blocked, for example, by the addition of one or more post-translational modifications to the casein, such as phosphorylation, glycosylation (FIG. 11D) or lipidation (FIG. 11E). Thus, in some embodiments, a recombinant casein protein described herein comprises one or more post-translational modifications. The post-translational modifications may, in some embodiments, prevent proteolysis by endogenous plant proteases. For example, the presence of one or more post-translational modifications on a recombinant casein may reduce proteolysis of the casein in a plant cell by at least 10%, at least 20%, at least 30%, at least 40%, at least 50%, at least 60%, at least 70%, at least 80%, at least 90%, at least 100%, at least 200% or more, relative to the proteolysis of a casein that does not have the one or more post-translational modifications. In some embodiments, the presence of one or more post-translational modifications on a recombinant casein may lead to an increase in expression of at least 2-fold, at least 3-fold, at least 4-fold, at least 5-fold, at least 10-fold, at least 20-fold, at least 30-fold, at least 40-fold, at least 50-fold or more, relative to the expression of a casein that does not have the one or more post-translational modifications. The recombinant casein proteins comprising post-translational modifications described herein may be expressed alone or may be expressed in a fusion protein (e.g., a casein protein homo- or hetero-multimer).

[0312] In some embodiments, the post-translational modifications may be non-mammalian post-translational modifications. For example, the post-translational modifications may be plant post-translational modifications. In some embodiments, the post-translational modifications may not typically occur in a casein protein when expressed in a plant or an animal cell. A non-limiting list of post-translational modifications that may be used to prevent proteolysis by endogenous plant proteases includes glycosylation (e.g., 0-glycans, N-glycans, or glycosaminoglycans such as heparin, heparan sulfate, chondroitin sulfate, keratan sulfate or dermatan sulfate), phosphorylation, lipidation, ubiquitylation, nitrosylation, methylation, acetylation, amidation, prenylation, alkylation, gamma-carboxylation, biotinylation, oxidation, or sulfation. In some embodiments, the post-translational modification is phosphorylation.

[0313] In some embodiments, a recombinant milk protein (e.g., a casein protein) comprises a site for post-translational modification that is not present in the native form of the protein. In some embodiments, a recombinant milk protein (e.g., a casein protein) comprises at least one, at least two, at least three, at least four, at least five, at least six, at least seven, at least eight, at least nine, or more sites for post-translational modifications that are not present in the native form of the protein. In some embodiments, a recombinant milk protein (e.g., a casein protein) comprises at least one, at least two, at least three, at least four, at least five, at least six, at least seven, at least eight, at least nine, or more post-translational modifications at sites that are not present in the native form of the protein.

[0314] In some embodiments, a recombinant milk protein (e.g., a casein protein) comprises an amino acid sequence that is modified to promote addition of one or more post-translational modifications in a plant cell. In some embodiments, the one or more post-translational modifications are selected from glycosylation, phosphorylation, lipidation, ubiquitylation, nitrosylation, methylation, acetylation, amidation, prenylation, alkylation, gamma-carboxylation, biotinylation, oxidation, and sulfation. In some embodiments, the amino acid sequence of a recombinant casein protein may be modified to introduce one or more glycosylation or phosphorylation sites.

[0315] In some embodiments, a milk protein is expressed in a plant, wherein the milk protein comprises an amino acid sequence that is modified to promote addition of one or more post-translational modifications, and wherein the milk protein comprises one or more post-translational modifications that are not present in a non-modified milk protein expressed in the same type of plant. In some embodiments, the milk protein is expressed in a plant in an amount of 1% or higher per total protein weight of soluble protein extractable from the plant. In some embodiments, the milk protein is a casein protein selected from α-S1 casein, α-S2 casein, (3-casein, κ-casein, and para-κ-casein.

[0316] In some embodiments, a fusion protein comprises (i) a recombinant milk protein that comprises an amino acid sequence that is modified to promote addition of one or more post-translational modifications in a plant cell, and (ii) at least one additional protein. In some embodiments, the at least one additional protein is a milk protein. In some embodiments, the at least one additional protein is a casein protein selected from α-S1 casein, α-S2 casein, (3-casein, κ-casein, and para-κ-casein. In some embodiments, the at least one additional protein is β-lactoglobulin. In some embodiments, the recombinant milk protein is κ-casein or para-κ-casein and the at least one additional protein is β-lactoglobulin. In some embodiments, the recombinant milk protein is β-casein and the at least one additional protein is β-lactoglobulin. In some embodiments, the recombinant milk protein is α-S1 casein or α-S2 casein and the at least one additional protein is β-lactoglobulin. In some embodiments, the fusion protein is expressed in a plant in an amount of 1% or higher per total protein weight of soluble protein extractable from the plant. In some embodiments, the plant is soybean.

[0317] In some embodiments, a transgenic plant expresses a milk protein comprising an amino acid sequence that is modified to promote addition of one or more post-translational modifications, or a fusion protein comprising the same.

[0318] Proteolysis of recombinant caseins in plant cells may also be prevented by modifying the plant cell itself. Without being bound by any theory, it is believed that in wildtype seeds, proteases present in one or more cellular compartments may bind to and cleave casein expressed therein. Thus, casein does not accumulate at high levels in the seeds (See FIG. 18, top panel). In contrast, when expression of one or more proteases is knocked-down or knocked-out in the seed (indicated by “X” in the bottom panel of FIG. 18), degradation of the casein is substantially prevented. Accordingly, the casein can accumulate in the seed. This strategy may be used to increase expression in the seed of casein monomers (i.e., caseins expressed alone, not as a fusion protein), or fusion proteins comprising one or more caseins.

[0319] In some embodiments, expression of one or more endogenous plant proteases may be knocked down or knocked out in a plant cell (e.g., a seed). The one or more proteases may be, for example, one or more proteases endogenously expressed in a plant (e.g., a soybean), such as cysteine proteases, serine proteases, threonine proteases, or aspartic proteases, glutamic protases, metalloproteases, or asparagine peptide lyases. A non-limiting list of genes encoding proteases that may be knocked down or knocked out in a plant cell is provided below in Table 10. Additional proteases that may be knocked down or knocked out in a soybean cell are described in Shamimuzzaman M., Vodkin L (2018) Ribosome profiling reveals changes in translational status of soybean transcripts during immature cotyledon development. PLoS ONE 13(3): e0194596.

[0320] In some embodiments, expression of at least one, at least two, at least three, at least four, at least five, at least six, at least seven, at least eight, at least nine, at least ten or more proteases may be knocked down or knocked out in a plant cell.

TABLE 10
Genes encoding proteases that are transcriptionally active in soybeans
Soybean Gene ID

Glyma.02g213000
Glyma.03g125400
Glyma.03g239700
Glyma.04g022500
Glyma.04g027600
Glyma.04g091800
Glyma.06g022600
Glyma.06g027700
Glyma.06G272700
Glyma.06g275300
Glyma.08g116300
Glyma.08G116400
Glyma.09g187200
Glyma.09g226700
Glyma.09g249500
Glyma.10g207100
Glyma.12G010100
Glyma.13g027600
Glyma.13g196200
Glyma.13g208200
Glyma.13g255900
Glyma.13g321700
Glyma.14g048000
Glyma.14g064600
Glyma.14g085800
Glyma.14g216300
Glyma.15g177800
Glyma.15g234300
Glyma.16G018900
Glyma.17g164100
Glyma.17g239000
Glyma.17g254900
Glyma.18G242900
Glyma.18g250100
Glyma.19G236600

TABLE 11
Proteases that may be knocked down or knocked out in a plant cell

| | Accession No. | DNA | Protein |
|---|---|---|---|
| Protein Name | (Uniprot) | Sequence | Sequence |
| Peptidase A1 domain- | Glyma.04g091800 | 851 | 852 |
| containing protein | | | |
| Cysteine proteinase | Glyma.10g207100 | 853 | 854 |
| 34 kDa maturing seed | Glyma.08g116300 | 855 | 856 |
| protein | | | |
| Uncharacterized protein | Glyma.06g275300 | 857 | 858 |
| (cysteine protease family | | | |
| C1-related) | | | |
| Uncharacterized protein | Glyma.17g164100 | 859 | 560 |
| (Subsilin-like serine | | | |
| peptidase) | | | |

[0321] In some embodiments, a plant cell for expressing recombinant milk proteins is provided, wherein expression of one or more proteases is reduced (e.g., knocked down or knocked out) in the cell. The expression of the one or more proteases may be reduced (e.g., knocked down or knocked out), for example, using a gene editing technology (e.g., CRISPR, TALENs, Zn Finger Nuclease, etc.) or base editing technology (e.g., using a cytidine deaminase or an adenosine deaminase). In some embodiments, expression of the one or more proteases may be reduced using RNA interference (e.g., microRNAs or siRNAs). In some embodiments the one or more proteases that is knocked down or knocked out is a cysteine protease, a serine protease, or an aspartyl protease. In some embodiments, the one or more proteases that is knocked down or knocked out is any one of the proteases listed in Table 10 or Table 11. In some embodiments, the one or more proteases that is knocked down or knocked out comprises the sequence of any one of SEQ ID NO: 852, 584, 856, 858, or 860. In some embodiments, the one or more proteases that is knocked down or knocked out comprises a sequence with at least 85%, at least 90%, at least 91%, at least 92%, at least 93%, at least 94%, at least 95%, at least 96%, at least 97%, at least 98%, or at least 99% sequence identity with any one of SEQ ID NO: 852, 584, 856, 858, or 860. In some embodiments, the one or more proteases that is knocked down or knocked out comprises a sequence of any one of SEQ ID NO: 852, 584, 856, 858, or 860 plus at least 1, at least 2, at least 3, at least 4, at least 5, at least 6, at least 7, at least 8, at least 9, at least 10, at least 11, at least 12, at least 13, at least 14, at least 15, or more amino acid substitutions. The expression or activity of endogenous plant proteases may also be reduced using small molecule inhibitors thereof (i.e., protease inhibitors).

[0322] Also provided is a transgenic plant comprising a plant cell for expressing recombinant milk proteins, wherein expression of one or more proteases is reduced (e.g., knocked down or knocked out) in the plant.

[0323] In some embodiments, a method for stably expressing a recombinant milk protein in a plant comprises: (i) reducing expression of one or more proteases in the plant, (ii) transforming the plant with a plant transformation vector comprising an expression cassette encoding a recombinant milk protein or a fusion protein comprising the same, (iii) growing the transformed plant under conditions wherein the recombinant milk protein is expressed in an amount of 1% or higher per total weight of soluble protein extractable from the plant.

[0324] In some embodiments, a recombinant casein protein that comprises one or more post-translational modifications is produced in a plant cell by expressing or over-expressing one or more enzymes in the plant cell, such as an enzyme known to perform post-translational modifications (e.g., a kinase, a phosphatase, or glycosyltransferase). In some embodiments, a recombinant casein protein that comprises one or more post-translational modifications is produced in a plant cell by knocking out or knocking down one or more enzymes the plant cell known to remove or prevent addition of post-translational modifications (e.g., a phosphatase or an endoglycosidase). In some embodiments, a recombinant casein protein that comprises one or more post-translational modifications is produced in a plant cell by contacting the cell with one or more precursors of the post-translational modification (e.g., a nucleotide sugar precursor).

[0325] In some embodiments, a recombinant casein protein comprises one or more glycoprotein tags. For example, in some embodiments, a recombinant casein protein may comprise a glycoprotein tag derived from a hydroxyproline (Hyp)-rich glycoprotein (GRGP). In some embodiments, the glycoprotein tag comprises SP repeats. For example, the glycoprotein tag may be derived from a glycoprotein comprising 11 tandem SP repeats (See Glyma.02 g204500, annotated as early nodulin-like protein 10 in soy). In some embodiments, the fusion protein comprises the M domain of CD45 (receptor-type tyrosine-protein phosphatase C), or a fragment or derivative thereof. For example, in some embodiments, the fusion protein comprises amino acids Ala231 to Asp 290 of Uniprot Accession No. P08575. In some embodiments, the glycoprotein tag comprises the sequence of SEQ ID NO: 824. In some embodiments, the glycoprotein tag is encoded by the sequence SEQ ID NO: 825. In some embodiments, the glycoprotein tag comprises the sequence of SEQ ID NO: 827. In some embodiments, the glycoprotein tag is encoded by the sequence of SEQ ID NO: 826. The glycoprotein tag may be fused, in some embodiments, to the N-terminus or the C-terminus of the casein protein.

[0326] Illustrative expression cassettes for expressing a gene of interest (GOI; e.g., a casein) fused to a glycoprotein tag are provided in FIG. 25A-25F. In some embodiments, an expression cassette comprises a promoter, a signal peptide, a glycoprotein tag, a GOI (e.g., a casein) and a terminator (See FIG. 25A). In some embodiments, an expression cassette comprises a promoter, a signal peptide, a GOI, a glycoprotein tag, and a terminator. (See FIG. 25B). In some embodiments, an expression cassette comprises the GmSeed 2 promoter (SEQ ID NO: 813), the pat21ss signal peptide (SEQ ID NO: 823), a (SP)11 glycoprotein tag (SEQ ID NO: 825), a GOI (e.g., a casein) and the AtHSP/AtUBi10 Terminator (SEQ ID NO: 815, 816) (See FIG. 25C). In some embodiments, an expression cassette comprises the GmSeed 2 promoter (SEQ ID NO: 813), the pat21ss signal peptide (SEQ ID NO: 823), a GOI (e.g., a casein), a (SP)11 glycoprotein tag (SEQ ID NO: 825), and the AtHSP/AtUBi10 Terminator (SEQ ID NO: 815,816) (See FIG. 25D). In some embodiments, an expression cassette comprises the GmSeed 2 promoter (SEQ ID NO: 813), the sig2 signal peptide (SEQ ID NO: 814), a CD45 tag (SEQ ID NO: 827), a GOI (e.g., a casein), a KDEL sequence, and the AtHSP/AtUBi10 Terminator (SEQ ID NO: 815, 816) (See FIG. 25E). In some embodiments, an expression cassette comprises the GmSeed 2 promoter (SEQ ID NO: 813), the sig2 signal peptide (SEQ ID NO: 814), a GOI (e.g., a casein), a CD45 tag (SEQ IDNO: 827), a KDEL sequence, and the AtHSP/AtUBi10 Terminator (SEQ ID NO: 815, 816) (See FIG. 25F).

[0327] Following protein synthesis, many eukaryotic proteins undergo post-translational modification (PTM). These modifications may be for example, the covalent addition of a function group, and contributes to protein diversity and function. Examples of PTMs include, but are not limited to, phosphorylation, glycosylation, ubiquitination, nitrosylation, methylation, acetylation, and lipidation. The proteins within milk also undergo PTM (Greenberg et al., “Human beta-casein. Amino acid sequence and identification of phosphorylation sites,” J. Biol. Chem., 1984, 259(8):5132-5138, Imafidon et al., “Isolation, purification, and alteration of some functional groups of major milk proteins: a review,” Crit. Rev. Food. Sci. Nutr. 37(7):663-689, 1997). For example, alpha and beta caseins are phosphorylated, and kappa casein is glycosylated. It has been reported that caseins assemble in a colloidal complex with calcium phosphate and other minerals.

[0328] In some embodiments, a casein protein expressed in a plant cell comprises different post-translational modifications relative to the same casein protein expressed by a mammalian cell. In some embodiments, a casein protein expressed in a plant cell does not comprise any post-translational modifications. In some embodiments, a casein protein expressed in a plant cell has reduced phosphorylation compared to the same casein protein expressed in a mammalian cell. In some embodiments, a casein protein expressed in a plant cell has increased phosphorylation compared to the same casein protein expressed in a mammalian cell.

[0329] In some embodiments, the compositions and methods described herein can be used to produce a casein protein that does not comprise any post-translational modifications. In some embodiments, the compositions and methods described herein can be used to produce a casein protein that is substantially free of phosphorylation. In some embodiments, the compositions and methods described herein can be used to produce a casein protein in a plant cell that comprises substantially the same level of post-translational modifications relative to the same casein protein expressed in a mammalian cell. In some embodiments, the compositions and methods described herein can be used to produce a casein protein that comprises substantially the same level of phosphorylation relative to the same casein protein expressed in a mammalian cell. For example, in some embodiments, a casein protein expressed in a plant cell may comprise at least 50%, at least 60%, at least 70%, at least 80%, at least 90%, or at least 95% of the number of phosphates relative to the same casein protein expressed in a mammalian cell.

### Methods for Producing Recombinant Milk Proteins, Including Casein Proteins

[0330] The recombinant milk proteins (e.g., casein proteins) described herein may be produced in a number of non-mammalian species, including for example, plants and microorganisms such as yeast and bacteria.

[0331] The recombinant casein proteins may be expressed in one or more non-mammalian cells using genetic sequences (e.g., DNA or RNA sequences) isolated or derived from cow (Bos taurus), goat (Capra hircus), sheep (Ovis aries), water buffalo (Bubalus bubalis), dromedary camel (Camelus dromedaries), bactrian camel (Camelus bactrianus), wild yak (Bos mutus), horse (Equus caballus), donkey (Equus asinus), reindeer (Rangifer tarandus), Eurasian elk (Alces alces), alpaca (Vicugna pacos), zebu (Bos indicus), llama (Lama glama), or human (Homo sapiens). In some embodiments, a genetic sequence used to encode the recombinant casein has at least 80%, at least 85%, at least 90%, at least 95%, at least 96%, at least 97%, at least 98%, or at least 99% identity with the genetic sequence sued to encode a casein protein in one or more of cow (Bos taurus), goat (Capra hircus), sheep (Ovis aries), water buffalo (Bubalus bubalis), dromedary camel (Camelus dromedaries), bactrian camel (Camelus bactrianus), wild yak (Bos mutus), horse (Equus caballus), donkey (Equus asinus), reindeer (Rangifer tarandus), eurasian elk (Alces alces), alpaca (Vicugna pacos), zebu (Bos indicus), llama (Lama glama), or human (Homo sapiens). In some embodiments, the recombinant casein protein expressed in a non-mammalian cell has at least 80%, at least 85%, at least 90%, at least 95%, at least 96%, at least 97%, at least 98%, or at least 99% identity with a casein protein from one or more of cow (Bos taurus), goat (Capra hircus), sheep (Ovis aries), water buffalo (Bubalus bubalis), dromedary camel (Camelus dromedaries), bactrian camel (Camelus bactrianus), wild yak (Bos mutus), horse (Equus caballus), donkey (Equus asinus), reindeer (Rangifer tarandus), eurasian elk (Alces alces), alpaca (Vicugna pacos), zebu (Bos indicus), llama (Lama glama), or human (Homo sapiens).

[0332] When expressed in a plant, the recombinant casein proteins may be extracted using standard methods known in the art. For example, the casein proteins may be extracted using solvent or aqueous extraction or using phenol extraction. Once extracted, the casein proteins may be maintained in a buffered environment (e.g., Tris, MOPS, HEPES), in order to avoid sudden changes in the pH. The casein proteins may also be maintained at a particular temperature, such as 4° C. One or more additives may be used to aid the extraction process (e.g., salts, protease/peptidase inhibitors, osmolytes, reducing agents, etc.).

### Protein Co-Expression in Plants

[0333] Another way to increase accumulation of one or more recombinant proteins, such as milk proteins, in a plant cell is to co-express the protein with a second protein, such as a protein capable of forming a protein body (e.g., a prolamin). Without being bound by any theory, it is believed that co-expressing a milk protein and a prolamin protein in a plant cell will cause protein body formation in the plant cell, wherein the milk protein gets sequestered into and/or associated with the protein body. This protects the milk protein from degradation by one or more proteases and increases accumulation thereof in the plant cell.

[0334] In some embodiments, two or more recombinant proteins may be co-expressed in a plant cell. In some embodiments, one of the two or more recombinant proteins is a milk protein (e.g., casein protein). In some embodiments, the milk protein is selected from the group consisting of: α-S1 casein, α-S2 casein, β-casein, κ-casein, para-κ-casein, β-lactoglobulin, α-lactalbumin, lysozyme, lactoferrin, lactoperoxidase, and an immunoglobulin. In some embodiments, the milk protein is β-casein or β-lactoglobulin.

[0335] In some embodiments, one of the two or more proteins is a protein capable of forming a protein body. For example, in some embodiments, one of the two or more proteins is a prolamin (e.g., zein and/or canein). In some embodiments, the prolamin is selected from the group consisting of: gliadin, a hordein, a secalin, a zein, a kafirin, and an avenin. In some embodiments, the protein capable of forming a protein body is a hydrophobin or an elastin-like protein. In some embodiments, at least two proteins are co-expressed in a plant cell (e.g., a casein protein and a prolamin). In some embodiments, the at least two proteins are casein and zein (e.g., gamma-zein). In some embodiments, the at least two proteins are casein and canein.

[0336] In some embodiments, a method for expressing a first recombinant protein in a cell comprises: (i) contacting the cell with a vector encoding a first recombinant protein, and (ii) contacting the cell with a vector encoding a second recombinant protein, wherein the second recombinant protein is capable of forming a protein body (e.g., a prolamin.) In some embodiments, the first recombinant protein is a casein protein, such as a milk protein.

[0337] A milk protein (e.g., a casein protein) may, in some embodiments, be co-expressed with a protein capable of forming a protein body (e.g., a prolamin) in a transgenic plant. In some embodiments, co-expressing a milk protein (e.g., a casein protein) with a protein capable of forming a protein body (e.g., a prolamin) in a transgenic plant leads to accumulation of the milk protein in an amount of at least 1%, at least 1.5%, at least 2%, at least 2.5%, at least 3%, at least 3.5%, at least 4%, at least 4.5%, at least 5%, at least 5.5%, at least 6%, at least 6.5%, at least 7%, at least 7.5%, at least 8%, at least 8.5%, at least 9%, at least 9.5%, at least 10%, at least 10.5%, at least 11%, at least 11.5%, at least 12%, at least 12.5%, at least 13%, at least 13.5%, at least 14%, at least 14.5%, at least 15%, at least 15.5%, at least 16%, at least 16.5%, at least 17%, at least 17.5%, at least 18%, at least 18.5%, at least 19%, at least 19.5%, at least 20%, or more of total protein weight of soluble protein extractable from the plant.

[0338] Illustrative constructs for co-expressing a milk protein (e.g., a casein protein) and a protein capable of inducing formation of a protein body in a plant cell are provided in FIG. 26A-26G. In some embodiments, a construct comprises (i) a first expression cassette comprising a promoter, a signal peptide, a Gene of Interest (e.g., a casein protein) and a terminator, and (ii) a second expression cassette comprising a promoter, a signal peptide, a protein that induces protein body formation, and a terminator (See FIG. 26A). In some embodiments, a construct comprises (i) a first expression cassette comprising a promoter, a signal peptide, a Gene of Interest (e.g., a casein protein) and a terminator, and (ii) a second expression cassette comprising a promoter, a signal peptide, a prolamin, and a terminator (See FIG. 26B). In some embodiments, a construct comprises (i) a first expression cassette comprising a promoter, a signal peptide, a Gene of Interest (e.g., a casein protein) and a terminator, and (ii) a second expression cassette comprising a promoter, a signal peptide, a zein, and a terminator (See FIG. 26C). In some embodiments, a construct comprises (i) a first expression cassette comprising a promoter, a signal peptide, a Gene of Interest (e.g., a casein protein) and a terminator, and (ii) a second expression cassette comprising a promoter, a signal peptide, a canein, and a terminator (See FIG. 26D). In some embodiments, a construct comprises (i) a first expression cassette comprising a promoter, a signal peptide, a Gene of Interest (e.g., a casein protein) and a terminator, and (ii) a second expression cassette comprising a promoter, a signal peptide, a hydrophobin, and a terminator (See FIG. 26E). In some embodiments, a construct comprises (i) a first expression cassette comprising a promoter, a signal peptide, a Gene of Interest (e.g., a casein protein) and a terminator, and (ii) a second expression cassette comprising a promoter, a signal peptide, an elastin-like protein, and a terminator (See FIG. 26F). In some embodiments, a construct comprises (i) a first expression cassette comprising a GmSeed2 promoter, a Sig2 signal peptide, a Gene of Interest (e.g., a casein protein) and a AtHSP/AtUbi10 terminator, and (ii) a second expression cassette comprising a GmSeed 12 promoter, a Coixss signal peptide, a protein that induces protein body formation, and a EU Term/Tm6 terminator (See FIG. 26G). An illustrative binary vector for use in co-expressing a casein and a protein that can induce protein body formation is provided in FIG. 27.

[0339] In some embodiments, a milk protein (e.g., a casein protein) can be co-expressed with one or more proteins capable of adding or removing a post-translational modification to/from a milk protein. For example, in some embodiments, the milk protein may be co-expressed with one or more of a kinase, a phosphatase, or a glycosyltransferase. In some embodiments, the milk protein is co-expressed with a kinase. The kinase may be for example, a kinase that phosphorylates Ser-X-Glu/pSer motifs. In some embodiments, the kinase may be a kinase in the family 20C, such as the Fam20C kinase. In some embodiments, the kinase may be a fragment or derivative of the Fam20C kinase, such as a truncated Fam20C comprising amino acids 94-586 of the native protein. In some embodiments, the kinase comprises amino acids 94-586 of SEQ ID NO: 821, or a sequence at least 90%, at least 95%, at least 96%, at least 97%, at least 98%, or at least 99% identical thereto. In some embodiments, the kinase is encoded by the sequence of SEQ ID NO: 820, or a sequence at least 90%, at least 95%, at least 96%, at least 97%, at least 98%, or at least 99% identical thereto.

[0340] Illustrative expression cassettes that may be used to co-express a milk protein (e.g., a casein protein) with a kinase (or other enzyme capable of adding/removing a PTM) are shown in FIG. 24A-24E. In some embodiments, a construct for co-expression of a milk protein in a cell comprises: (i) a first expression cassette comprising a promoter, a signal peptide, a Gene of Interest (GOI, e.g., a casein protein) and a terminator, and (ii) a second expression cassette comprising a promoter, a 5′UTR, a signal peptide, a Gene of Interest (GOI, e.g., a kinase), and a terminator (See FIG. 24B). In some embodiments, a construct for co-expression of a milk protein in a cell comprises: (i) a first expression cassette comprising a promoter, a signal peptide, a Gene of Interest (GOI, e.g., a casein protein) and a terminator, and (ii) a second expression cassette comprising a promoter, a 5′UTR, a signal peptide, a Gene of Interest (GOI, e.g., a kinase in the 20C family), and a terminator (See FIG. 24A). In some embodiments, a construct for co-expression of a milk protein in a cell comprises: (i) a first expression cassette comprising a promoter, a signal peptide, a Gene of Interest (GOI, e.g., a casein protein) and a terminator, and (ii) a second expression cassette comprising a promoter, a 5′UTR, a signal peptide, a Gene of Interest (GOI, e.g., a Fam20C kinase), and a terminator (See FIG. 24C). In some embodiments, a construct for co-expression of a milk protein in a cell comprises: (i) a first expression cassette comprising a promoter, a signal peptide, a Gene of Interest (GOI, e.g., a casein protein) and a terminator, and (ii) a second expression cassette comprising a promoter, a 5′UTR, a signal peptide, a Gene of Interest (GOI, e.g., a truncated Fam20C kinase), and a terminator (See FIG. 24D). In some embodiments, the promoter may be the GmSeed2 promoter (SEQ ID NO: 813) or the PvPhas promoter (SEQ ID NO: 817). In some embodiments, the promoter may be the Sig2 signal peptide (SEQ ID NO: 814) or the sig10 signal peptide (SEQ ID NO: 819). In some embodiments, the terminator may be the AtHSP/AtUbi10 Terminator (SEQ ID NO: 815, 816) or the 3arc Terminator (SEQ ID NO: 822). In some embodiments, the 5′UTR may be the Arc 5′UTR (SEQ ID NO: 818). In some embodiments, the construct for co-expression of a milk protein in a cell comprises the construct of FIG. 24E. An illustrative binary vector is provided in FIG. 23.

[0341] In some embodiments, a milk protein (e.g., a casein protein) can be co-expressed with one or more proteins capable of inhibiting a protease. Illustrative plant proteins that may be used to inhibit one or more proteases are shown above in Table 4. In some embodiments, a milk protein may be co-expressed with any one of the proteins shown in Table 4. In some embodiments, a milk protein is co-expressed with a protein that comprises the sequence of any one of SEQ ID NO: 840, 842, 844, 846, 848 or 850. In some embodiments, a milk protein may be co-expressed with a protein having a sequence with at least 85%, at least 90%, at least 91%, at least 92%, at least 93%, at least 94%, at least 95%, at least 96%, at least 97%, at least 98%, or at least 99% identity to any one of SEQ ID NO: 840, 842, 844, 846, 848 or 850. In some embodiments, the milk protein may be co-expressed with a protein having the sequence of any one of SEQ ID NO: 840, 842, 844, 846, 848 or 850 plus at least 1, at least 2, at least 3, at least 4, at least 5, at least 6, at least 7, at least 8, at least 9, at least 10, at least 11, at least 12, at least 13, at least 14, at least 15, or more amino acid substitutions.

[0342] In some embodiments, protein co-expression can be utilized to reduce or prevent degradation of the one or more proteins in the plant cell, such as protease-mediated degradation in the plant cell. In some embodiments, the protein-co-expression is useful to reduce or prevent degradation of one or more milk proteins by proteases in a plant cell. In some embodiments co-expressing one or more milk proteins (e.g., casein protein) and a prolamin (e.g., a canein or a zein) may lead to the formation of a protein body in a seed of a plant. In some embodiments, the one or more milk proteins can be sequestered in and/or associated with the protein body, which in turn partially or fully shields the one or more milk proteins from degradation by plant cell proteases thereby allowing for accumulation of the one or more milk proteins. In some embodiments, the one or more milk proteins can be sequestered in the protein body, which in turn may protect a plant cell from potential toxic effects of recombinant proteins, such as any toxic effects of the one or more proteins.

[0343] In some embodiments, protein co-expression is effective in increasing at least one of concentration, stability, or expression of one or more proteins in a plant cell. In some embodiments, protein co-expression is effective in increasing concentration of one or more proteins in a plant cell as determined by detecting the amount of the one or more protein in the plant cell. In some embodiments, protein co-expression is effective in increasing stability of one or more proteins in a plant cell. Increased stability can be determined by detecting persistence of the one or more proteins in the plant cell over time or detecting a level of degradation. In some embodiments, protein co-expression is effective in increasing expression of one or more proteins in a plant cell. Increased expression can be determined by measuring protein level and/or accumulation in the plant cell. In some embodiments, protein co-expression is effective in increasing at least one of: concentration, stability, or expression of one or more proteins by at least about 1-fold, 10-fold, 19-fold, 28-fold, 37-fold, 46-fold, 55-fold, 64-fold, 73-fold, 82-fold, 91-fold, 100-fold, 109-fold, 118-fold, 127-fold, 136-fold, 145-fold, 154-fold, 163-fold, 172-fold, 181-fold, 190-fold, 199-fold, 208-fold, 217-fold, 226-fold, 235-fold, 244-fold, 253-fold, 262-fold, 271-fold, 280-fold, 289-fold, 298-fold, or up to about 300-fold as compared to an otherwise comparable method lacking the protein co-expression. In some embodiments, protein co-expression is effective in increasing at least one of concentration, stability, or expression of one or more proteins in a plant cell by at least about 1-fold to 10-fold, 5-fold to 30-fold, 20-fold to 50-fold, 40-fold to 100-fold, or 100-fold to 200-fold as compared to an otherwise comparable method lacking the protein co-expression.

[0344] In some embodiments, protein co-expression is effective in reducing toxicity of recombinant expression of the one or more proteins in a plant cell. In some embodiments, protein co-expression is effective in reducing toxicity of recombinant expression of one or more proteins in a plant cell by at least about 1-fold, 10-fold, 19-fold, 28-fold, 37-fold, 46-fold, 55-fold, 64-fold, 73-fold, 82-fold, 91-fold, 100-fold, 109-fold, 118-fold, 127-fold, 136-fold, 145-fold, 154-fold, 163-fold, 172-fold, 181-fold, 190-fold, 199-fold, 208-fold, 217-fold, 226-fold, 235-fold, 244-fold, 253-fold, 262-fold, 271-fold, 280-fold, 289-fold, 298-fold, or up to about 300-fold as compared to an otherwise comparable method lacking the protein co-expression. In some embodiments, protein co-expression is effective in reducing toxicity associated with recombinant expression of one or more proteins in a plant cell by at least about 1-fold to 10-fold, 5-fold to 30-fold, 20-fold to 50-fold, 40-fold to 100-fold, or 100-fold to 200-fold as compared to an otherwise comparable method lacking the protein co-expression.

[0345] In some embodiments, protein co-expression may be achieved via transformation of a composition comprising one or more vectors encoding the one or more proteins into a plant cell. In some embodiments, one or more vectors are binary agrobacterium vectors. In some embodiments, one or more vectors encodes for one or more protein sequences. In some embodiments, a single vector encodes for two or more protein sequences. In some embodiments, two or more vectors are used to introduced two or more sequences into a plant cell. In some embodiments, a vector encodes for a milk protein (e.g., casein protein) and a prolamin (e.g., a canein or a zein). In some embodiments, a vector encodes for a milk protein and a protein capable of forming a protein body. In some embodiments a first vector encodes for a milk protein and a second vector encodes for a prolamin. In some embodiments, a first vector encodes for a milk protein and a second vector encodes for a prolamin. Also provided are compositions that comprise one or more vectors described herein.

### Food Compositions Comprising a Fusion Protein or a Protein Derived Therefrom

[0346] The fusion proteins, recombinant proteins, and transgenic plants described herein may be used to prepare food compositions. The fusion protein may be used directly to prepare the food composition (i.e., used in the form of a fusion protein), or the fusion protein may first be separated into its constituent proteins. For example, in some embodiments, a food composition may comprise (i) a fusion protein, (ii) a milk protein (structured or unstructured) or (iii) a non-milk protein, such as a structured mammalian, avian, or plant protein.

[0347] More specifically, the present disclosure provides alternative dairy compositions, solid phase protein-stabilized emulsions (including cheese compositions), and colloidal suspensions, each comprising one or more casein proteins. The casein proteins may be isolated or recombinant and may be selected from the group consisting of kappa-casein, para-kappa-casein, beta-casein, alpha-S1-casein and alpha-S2-casein. The compositions, emulsions, or suspensions described herein may be used to produce food compositions (e.g., cheese, yogurt, ice cream, etc.) that have organoleptic properties similar to traditional animal-derived dairy compositions. For example, the food compositions described herein may have one or more characteristics of a traditional animal-derived dairy composition, such as taste, aroma, appearance, handling, mouthfeel, density, structure, texture, elasticity, springiness, coagulation, binding, leavening, aeration, foaming, creaminess and emulsification. The food compositions described herein offer a sustainable, environmentally-friendly, cruelty-free alternative to traditional animal-derived dairy compositions.

[0348] In some embodiments, the alternative dairy compositions, solid phase, protein-stabilized emulsions, and colloidal suspensions comprising recombinant casein proteins have non-mammalian PTMs. In some embodiments, the recombinant casein proteins are not phosphorylated or glycosylated. In some embodiments, the recombinant casein proteins have an alternative PTM pattern, as compared to naturally occurring casein proteins.

[0349] PTMs have been reported to be important for the casein micelle structure, which determines the physical properties of milk. Unexpectedly, the recombinant proteins described herein are still able to confer to the compositions described herein one or more organoleptic properties similar to animal-derived dairy compositions, such as taste, appearance, mouthfeel, structure, texture, density, elasticity, springiness, coagulation, binding, leavening, aeration, foaming, creaminess, and emulsification.

[0350] Food compositions, including alternative dairy compositions, solid phase protein-stabilized emulsions, and colloidal suspensions, are described in more detail below.

### Solid Phase Protein-Stabilized Emulsions

[0351] Provided herein are solid phase, protein-stabilized emulsions comprising at least one milk protein. For example, in some embodiments, a solid phase, protein-stabilized emulsion comprises at least one casein protein. In some embodiments, a protein-stabilized emulsion comprises at least one recombinant casein protein. In some embodiments, a protein-stabilized emulsion comprises at least one plant-expressed casein protein. In some embodiments, a protein-stabilized emulsion comprises at least one casein protein isolated from milk (e.g., bovine milk). In some embodiments, the protein-stabilized emulsion is a cheese composition.

[0352] In some embodiments, a solid-phase protein stabilized protein emulsion comprises only one casein protein. In some embodiments, the one casein protein is recombinant beta-casein protein.

[0353] In some embodiments, a solid-phase protein stabilized protein emulsion comprises only two casein proteins. In some embodiments, the two casein proteins are recombinant beta-casein protein and kappa-casein protein. In some embodiments, the two casein proteins are recombinant beta-casein protein and para-kappa-casein protein. In some embodiments, the two casein proteins are recombinant beta-casein protein and alpha-S1-casein protein. In some embodiments, the two casein proteins are recombinant beta-casein protein and alpha-S2-casein protein.

[0354] In some embodiments, a solid-phase, protein stabilized emulsion comprises only three casein proteins. In some embodiments, the three casein proteins are recombinant beta-casein, kappa-casein, and para-kappa-casein. In some embodiments, the three casein proteins are recombinant beta-casein, kappa-casein, and alpha-S1-casein. In some embodiments, the three casein proteins are recombinant beta-casein, kappa-casein, and alpha-S2-casein. In some embodiments, the three casein proteins are recombinant beta-casein, para-kappa-casein, and alpha-S1-casein. In some embodiments, the three casein proteins are recombinant beta-casein, para-kappa-casein, and alpha-S2-casein.

[0355] In some embodiments, a solid-phase, protein stabilized emulsion comprises only four casein proteins. In some embodiments, one of the four casein proteins is recombinant beta-casein.

[0356] The casein proteins used in the solid-phase, protein-stabilized emulsions described herein may be selected from kappa-casein, para-kappa-casein, beta-casein, alpha-S1-casein and alpha-S2-casein. In some embodiments, the solid-phase protein stabilized emulsions may comprise, in addition to the casein protein(s), one or more additional milk proteins. In some embodiments, the solid-phase protein stabilized emulsions may comprise, in addition to the casein protein(s), one or more plant proteins.

[0357] In some embodiments, the emulsion has a firmness of at least 150 grams. In some embodiments, the emulsion has a melting point of about 35° C. to about 100° C. In some embodiments, the emulsion has an ability to stretch to at least 3 cm in length without breaking. In some embodiments, the emulsion has a firmness of at least 150 grams and a melting point of about 35° C. to about 100° C. In some embodiments, the emulsion has a firmness of at least 150 grams and an ability to stretch to at least 3 cm in length without breaking. In some embodiments, the emulsion has a melting point of about 35° C. to about 100° C. and an ability to stretch to at least 3 cm in length without breaking. In some embodiments, the emulsion has a firmness of at least 150 grams, a melting point of about 35° C. to about 100° C., and an ability to stretch to at least 3 cm in length without breaking.

[0358] Firmness, also referred to herein as hardness, may be measured by a number of methods known in the art, such as by compression, or using an instrument such as the Instron Testing Machine (A. H. Chen et al., Textural analysis of cheese, 1979, J. Dariy Sci. 62:901-907). For example, a cylindrical-shaped sample of a solid-phase, protein stabilized emulsion may be compressed from 50% to 100% relative to its original height and/or width. The cylindrical shaped-sample may have a height in the range of about 1 to about 10 cm, or more, and a diameter in the range of about 1 to about 10 cm, or more. The compression may occur at a predetermined temperature, such as a temperature in the range of about 0° C. to about 5° C., about 5° C. to about 10° C., about 10° C. to about 20° C., about 15° C. to about 25° C., about 20° C. to about 25° C., about 25° C. to about 25° C. In some embodiments, firmness may be determined by compressing a cylindrical-shaped sample having a height of about 3 cm, and a diameter of about 3 cm may be compressed to a height of 1.5 cm at 5° C. The compositions described herein may have a firmness in the range of about 50 to 100 grams, about 100 to about 150 grams, about 150 grams to about 200 grams, about 200 to about 300 grams, about 300 grams to about 400 grams, about 400 grams to about 500 grams, about 500 grams to about 600 grams, about 600 grams to about 700 grams, about 700 grams to about 800 grams, about 800 grams to about 900 grams, about 900 grams to 1 kilogram, or more.

[0359] Stretch ability may be analyzed by standard assays known in the art. For example, stretch ability may be determined by heating a 100 gram mass of an emulsion at a temperature of 225° C. for 4 minutes, cooling to about 90° C., and then pulling with a fork placed beneath the mass. Other methods to test stretch ability are well known in the art. See for example, Fife R. L et al, Test for measuring the stretch ability of melted cheese, 2002, J. Dairy Sci. 85(12):3539-3545.

[0360] In some embodiments, the recombinant casein protein may be expressed by a plant (i.e., it is a “plant-expressed” protein). In some embodiments, the recombinant protein may be expressed in a monocot, such as turf grass, maize (corn), rice, oat, wheat, barley, sorghum, orchid, iris, lily, onion, palm, or duckweed. In some embodiments, the recombinant casein protein may be expressed in a dicot, such as Arabidopsis, tobacco, tomato, potato, sweet potato, cassava, alfalfa, lima bean, pea, chickpea, soybean, carrot, strawberry, lettuce, oak, maple, walnut, rose, mint, squash, daisy, Quinoa, buckwheat, mung bean, cow pea, lentil, lupin, peanut, fava bean, French beans (i.e., common beans), mustard, or cactus. In some embodiments, the recombinant casein protein may be expressed in a non-vascular plant selected from moss, liverwort, homwort or algae. In some embodiments, the recombinant casein protein may be expressed in a vascular plant reproducing from spores (e.g., a fern). In some embodiments, the recombinant casein protein is expressed in a soybean plant.

[0361] In some embodiments, the recombinant casein protein is expressed in a microorganism. Microorganisms used for recombinant protein production are well known in the art (see for example, Ferrer-Miralles et al., Bacterial cell factories for recombinant protein production; expanding the catalogue, 2013, Microb Cell Fact. 2013; 12:113). In some embodiments, the recombinant casein protein is expressed in a yeast or a bacterium (i.e., it is “yeast-expressed” or “bacterial-expressed”). For example, the recombinant casein protein may be expressed in bacteria such as Escherichia coli, Caulobacter crescentus, Rodhobacter sphaeroides, Pseudoalteromonas haloplanktis, Shewanella sp., Pseudomonas putida, P. aeruginosa, P. fluorescens, Halomonas elongate, Chromohalobacter salexigens, Streptomyces lividans, S. griseus, Nocardia lactamdurans, Mycobacterium smegmatis, Corynebacterium glutamicum, C. ammoniagenes, Brevibacterium lactofermentum, Bacillus subtilis, B. brevis, B. megaterium, B. licheniformis, B. amyloliquefaciens, Lactococcus lactis, L. plantarum, L. casei, L. reuteri, or L. gasseri.

[0362] In some embodiments, the recombinant casein protein is expressed in a eukaryotic microorganism, such as Saccharomyces spp., Kluyveromyces spp., Pichia spp., Aspergillus spp., Tetrahymena spp., Yarrowla spp., Hansenula spp., Blastobotrys spp., Candida spp., Zygosaccharomyces spp., Debrayomyces spp., Fusarium spp., and Trichoderma spp.

[0363] In some embodiments, the solid-phase, protein stabilized emulsions comprise ash. In some embodiments, the solid-phase, protein stabilized emulsions comprise at least one lipid and at least one salt. “Lipid” means any of a class of molecules that are soluble in nonpolar solvents (such as ether and hexane) and relatively or completely insoluble in water. Lipid molecules are typically composed of long hydrocarbon tails that are hydrophobic in nature. Examples of lipids include fatty acids (saturated and unsaturated); glycerides or glycerolipids (such as monoglycerides, diglycerides, triglycerides or neutral fats, and phosphoglycerides or glycerophospholipids); and nonglycerides (sphingolipids, tocopherols, tocotrienols, sterol lipids including cholesterol and steroid hormones, prenol lipids including terpenoids, fatty alcohols, waxes, and polyketides).

[0364] Examples of lipids that may be included in the solid-phase, protein stabilized emulsion include, for example, dairy fats or vegetable oils such as palm oil or palm kernel oil, butter oil, anhydrous milkfat, soybean oil, corn oil, rapeseed oil, canola oil, sunflower oil, safflower oil, coconut oil, rice bran oil, olive oil, sesame oil, flaxseed oil, hemp oil, cottonseed oil, peanut oil, almond oil, beech nut oil, brazil nut oil, cashew oil, hazelnut oil, macadamia oil, mongongo nut oil, pecan oil, pine nut oil, pistachio oil, walnut oil, pumpkin seed oil, grapefruit seed oil, lemon oil, apricot oil, apple seed oil, argan oil, avocado oil, or orange oil. In some embodiments, the solid-phase, protein stabilized emulsion comprises butter or margarine.

[0365] Examples of salts that may be included in the emulsion include, but are not limited to, magnesium chloride, sodium chloride, calcium chloride, sodium phosphates and trisodium citrate.

[0366] In some embodiments, the emulsion comprises at least two plant-expressed casein proteins each selected from kappa-casein, para-kappa-casein, beta-casein, alpha-S1-casein and alpha-S2-casein. In some embodiments, the emulsion comprises at least three plant-expressed casein proteins each selected from kappa-casein, para-kappa-casein, beta-casein, alpha-S1-casein and alpha-S2-casein. In some embodiments, the emulsion comprises at least four plant-expressed casein proteins each selected from kappa-casein, para-kappa-casein, beta-casein, alpha-S1-casein and alpha-S2-casein. In some embodiments, the emulsion comprises at least one additional mammalian or plant protein that is not a casein protein.

[0367] Examples of combinations of casein, mammalian, and/or plant proteins that may be used in the solid phase, protein stabilized emulsions are shown below in Table 12. The casein or casein protein combination shown in Column 1 may be combined with one or more of the mammalian proteins listed in Column 2, and/or one or more of the plant proteins listed in Column three. In some embodiments, the solid-phase protein stabilized emulsions described herein comprise proteins from Column 1, and do not include any proteins from Column 2 or Column 3.

TABLE 12
Example combinations of casein, mammalian, and/or plant proteins

| | Mammalian proteins | Plant proteins |
|---|---|---|
| Casein proteins (Column 1) | (Column 2) | (Column 3) |
| κ-casein | Alpha-lactalbumin | Oleosins |
| Para-κ-casein | Beta-lactoglobulin | Leghemoglobin |
| β-casein | Albumin | Extensin-like protein |
| α-S1-casein | Lysozyme | family |
| α-S2-casein | Collagen family | Prolamine |
| κ-casein & para-κ-casein | Hemoglobin | Glutenin |
| κ-casein & β-casein | | Gamma-kafirin |
| κ-casein & α-S1-casein | | preprotein |
| κ-casein & α-S2-casein | | Alpha globulin |
| Para-κ-casein & β-casein | | Basic 7S globulin |
| Para-κ-casein & α-S1-casein | | precursor |
| Para-κ-casein & α-S2-casein | | 2S albumin |
| β-casein & α-S1-casein | | Beta-conglycinins |
| β-casein & α-S2-casein | | Glycinins |
| α-S1-casein & α-S2-casein | | Canein |
| κ-casein, para-κ-casein, & β-casein | | Zein |
| κ-casein, para-κ-casein, & α-S1-casein | | Patatin |
| κ-casein, para-κ-casein, & α-S2-casein | | Kunitz-Trypsin |
| Para-κ-casein, β-casein, & α-S1-casein | | inhibitor |
| Para-κ-casein, β-casein, & α-S2-casein | | Bowman-Birk |
| β-casein, α-S1-casein, & α-S2-casein | | inhibitor |
| κ-casein, β-casein, & α-S1-casein | | Cystatine |
| κ-casein, β-casein, & α-S2-casein | | |
| κ-casein, α-S1-casein & α-S2-casein | | |
| para-κ-casein, α-S1-casein & α-S2-casein | | |
| κ-casein, para-κ-casein, β-casein, α-S1- | | |
| casein | | |
| κ-casein, para-κ-casein, β-casein, & α-S2- | | |
| casein | | |
| Para-κ-casein, β-casein, α-S1-casein, & α- | | |
| S2-casein | | |
| κ-casein, β-casein, α-S1-casein, & α-S2- | | |
| casein | | |
| κ-casein, para-κ-casein, α-S1-casein & α- | | |
| S2-casein | | |

[0368] In some embodiments, the emulsion further comprises plant protein. For example, in some embodiments, the emulsion comprises protein from a legume, such as, for example, soybeans, chickpeas, kidney beans, black beans, pinto beans, green peas, and lentils. In some embodiments, the emulsion comprises protein from a grain, such as, for example, wheat, millet, barley, oats, rice, spelt, teff, amaranth, and quinoa. In some embodiments, the emulsion comprises protein from nuts, hempseed, chia seed, nutritional yeast, or spirulina. In some embodiment, the emulsion further comprises protein from potato. In some embodiments, the emulsion further comprises protein from a plant of the family Fabaceae.

[0369] In some embodiments, the emulsion has a pH of about 5.0 to about 6.7. In some embodiments, the emulsion has a pH of about 5.2 to about 5.9. In some embodiments, the emulsion has a pH of about 5.0, about 5.1, about 5.2, about 5.3, about 5.4, about 5.5, about 5.6, about 5.7, about 5.8, about 5.9, about 6.0, about 6.1, about 6.2, about 6.3, about 6.4, about 6.5, about 6.6, about 6.7, about 6.8, or about 6.9.

[0370] In some embodiments, the emulsion may further comprise one or more additional agents, such as an edible gum, starch, and/or gelling agent. Examples of edible gums include, but are not limited to, curdian, locust bean gum, carrageenan, gellan gum, xanthan gum, guar gum, agar agar, gelatin, sodium alginate, or combinations thereof. Examples of starch include, but are not limited to, potato starch, corn starch, rice flour, pea flour, modified starch, and combinations thereof. Examples of gelling agents include, but are not limited to, pectin, alginate, vegetable gums, gelatin, agar, methyl cellulose, enzymes (transglutaminase) and hydoroxypropylmethyl cellulose. In some embodiments, the emulsion may further comprise an acid or abase, such as lemon juice, lactic acid, acetic acid, citric acid, sodium citrate, sodium orthophosphates, sodium pyrophosphates, sodium polyphosphates, potassium citrate, potassium orthophosphates, potassium pyrophosphates, sorbic acid, potassium sorbate, tartaric acid, and sodium aluminum phosphate.

[0371] In some embodiments, the emulsion does not contain an organoleptically functional amount of beta-lactoglobulin. In some embodiments, the emulsion may comprise beta-lactoglobulin in the amount of about 0.01% (w/v) to about 0.1% (w/v), about 0.1% (w/v) to about 0.5% (w/v), about 0.5% (w/v) to about 1.0% (w/v), about 1.0% (w/v) to about 2% (w/v), about 2% (w/v) to about 3% (w/v), about 3% (w/v) to about 5% (w/v), about 5% (w/v) to about 10% (w/v), about 10% (w/v) to about 20% (w/v), about 20% (w/v) to about 40% (w/v), or more, of the emulsion.

[0372] As used herein, an “organoleptically functional amount of beta-lactoglobulin” refers to an amount of beta-lactoglobulin that significantly impacts one or more organoleptic properties of the composition. An organoleptic property is “significantly impacted” if it represents a change that can be detected by a human, using one or more of the senses taste, sight, smell, and/or touch. In some embodiments, a solid-phase, protein stabilized emulsion that does not comprise an organoleptically functional amount of beta-lactoglobulin may comprise only trace amounts of beta-lactoglobulin. In some embodiments, the emulsion may comprise beta-lactoglobulin in the range of about 0.01% (w/v) to about 0.1% (w/v), about 0.1% (w/v) to about 0.5% (w/v), about 0.5% (w/v) to about 1.0% (w/v), about 1.0% (w/v) to about 2% (w/v), about 2% (w/v) to about 3% (w/v), about 3% (w/v) to about 5% (w/v), about 5% (w/v) to about 10% (w/v), about 10% (w/v) to about 20% (w/v), about 20% (w/v) to about 40% (w/v), or more, of the emulsion.

[0373] In some embodiments, a solid phase, protein-stabilized emulsion comprises one plant-expressed casein protein selected from kappa-casein, para-kappa-casein, beta-casein, alpha-S1-casein, and alpha-S2-casein; wherein the emulsion does not contain any additional casein proteins; and wherein the emulsion has at least one of the following characteristics: i) a firmness of at least 150 grams; ii) a melting point of about 35° C. to about 100° C.; or iii) ability to stretch to at least 3 cm in length without breaking. In some embodiments, the emulsion further comprises at least one lipid and at least one salt. In some embodiments, the plant-expressed casein protein is expressed in a soybean plant. In some embodiments, the emulsion has a pH of about 5.2 to about 5.9. In some embodiments, the emulsion does not contain an organoleptically functional amount of beta-lactoglobulin. In some embodiments, the emulsion may comprise beta-lactoglobulin in the amount of about 0.01% (w/v) to about 0.1% (w/v), about 0.1% (w/v) to about 0.5% (w/v), about 0.5% (w/v) to about 1.0% (w/v), about 1.0% (w/v) to about 2% (w/v), about 2% (w/v) to about 3% (w/v), about 3% (w/v) to about 5% (w/v), about 5% (w/v) to about 10% (w/v), about 10% (w/v) to about 20% (w/v), about 20% (w/v) to about 40% (w/v), or more.

[0374] In some embodiments, a solid phase, protein-stabilized emulsion comprises: a plant-expressed casein protein selected from kappa-casein, para-kappa-casein, beta-casein, alpha-S1-casein, and alpha-S2-casein; and further comprises plant-expressed beta-lactoglobulin; wherein the ratio of the casein protein to the beta-lactoglobulin is about 8:1 to about 1:2. In some embodiments, the emulsion has at least one of the following characteristics: i) a firmness of at least 150 grams; ii) a melting point of about 35° C. to about 100° C.; or iii) ability to stretch to at least 3 cm in length without breaking. In some embodiments, the emulsion comprises at least at least one additional mammalian or plant protein that is not a casein protein. In some embodiments, the ratio of the casein protein to the beta-lactoglobulin is 1:2. In some embodiments, the ratio of the casein protein to the beta-lactoglobulin is about 2:1. In some embodiments, the emulsion has a pH of about 5.2 to about 5.9.

[0375] In some embodiments, a solid-phase protein-stabilized emulsion comprises about 8% (w/v) to about 25% (w/v) total protein, such as about 8% to about 10%, about 10% to about 15%, about 15% to about 20%, or about 20 to about 25% total protein. In some embodiments, a solid-phase protein stabilized emulsion comprises about 1% to about 10% (w/v) total protein. In some embodiments, a solid-phase protein stabilized emulsion comprises about 25% to about 35%, about 35% to about 45%, about 45% to about 55%, about 55% to about 65%, about 65% to about 75% (w/v), or more total protein.

[0376] In some embodiments, about 1% to about 5% of the total protein in the solid-phase protein stabilized emulsion is casein protein. In some embodiments, about 5% to about 10% of the total protein in the solid-phase protein stabilized emulsion is casein protein. In some embodiments, about 10% to about 20% of the total protein in the solid-phase protein stabilized emulsion is casein protein. In some embodiments, about 20% to about 30% of the total protein in the solid-phase protein stabilized emulsion is casein protein. In some embodiments, about 30% to about 40% of the total protein in the solid-phase protein stabilized emulsion is casein protein. In some embodiments, about 40% to about 50% of the total protein in the solid-phase protein stabilized emulsion is casein protein. In some embodiments, about 50% to about 60% of the total protein in the solid-phase protein stabilized emulsion is casein protein. In some embodiments, about 60% to about 70% of the total protein in the solid-phase protein stabilized emulsion is casein protein. In some embodiments, about 70% to about 80% of the total protein in the solid-phase protein stabilized emulsion is casein protein. In some embodiments, about 80% to about 90% of the total protein in the solid-phase protein stabilized emulsion is casein protein. In some embodiments, about 90% to about 100% of the total protein in the solid-phase protein stabilized emulsion is casein protein.

[0377] In some embodiments, at least 1%, at least 2%, at least 3%, at least 4%, at least 5%, at least 6%, at least 7%, at least 8%, at least 9%, at least 10%, at least 11%, at least 12%, at least 13%, at least 14%, at least 15%, at least 16%, at least 17%, at least 18%, at least 19%, at least 20%, or more of the total protein in the solid-phase protein stabilized emulsion is casein protein.

[0378] In some embodiments, about 20% to about 100% of the casein protein in the solid-phase protein-stabilized emulsion is kappa casein. For example, the emulsion may comprise about 20% to about 30%, about 30% to about 40%, about 40% to about 50%, about 50% to about 60%, about 60% to about 70%, about 70% to about 80%, about 80% to about 90%, or about 90% to about 100% kappa casein. In some embodiments, about 20% to about 30%, about 30% to about 40%, about 40% to about 50%, about 50% to about 60%, about 60% to about 70%, about 70% to about 80%, about 80% to about 90%, or about 90% to about 100% of the casein protein in the solid-phase protein-stabilized emulsion is kappa casein.

[0379] In some embodiments, about 20% to about 100% of the casein protein in the solid-phase protein-stabilized emulsion is para-kappa casein. For example, the emulsion may comprise about 20% to about 30%, about 30% to about 40%, about 40% to about 50%, about 50% to about 60%, about 60% to about 70%, about 70% to about 80%, about 80% to about 90%, or about 90% to about 100% para-kappa casein. In some embodiments, about 20% to about 30%, about 30% to about 40%, about 40% to about 50%, about 50% to about 60%, about 60% to about 70%, about 70% to about 80%, about 80% to about 90%, or about 90% to about 100% of the casein protein in the solid-phase protein-stabilized emulsion is para-kappa casein.

[0380] In some embodiments, about 20% to about 100% of the casein protein in the solid-phase protein-stabilized emulsion is beta casein. In some embodiments, about 50% to about 100% of the casein protein in the solid-phase protein-stabilized emulsion is beta casein. For example, the emulsion may comprise about 20% to about 30%, about 30% to about 40%, about 40% to about 50%, about 50% to about 60%, about 60% to about 70%, about 70% to about 80%, about 80% to about 90%, or about 90% to about 100% beta casein. In some embodiments, about 20% to about 30%, about 30% to about 40%, about 40% to about 50%, about 50% to about 60%, about 60% to about 70%, about 70% to about 80%, about 80% to about 90%, or about 90% to about 100% of the casein protein in the solid-phase protein-stabilized emulsion is beta casein.

[0381] In some embodiments, about 20% to about 100% of the casein protein in the solid-phase protein-stabilized emulsion is alpha-S1-casein. In some embodiments, about 50% to about 100% of the casein protein in the solid-phase protein-stabilized emulsion is alpha-S1-casein. For example, the emulsion may comprise about 20% to about 30%, about 30% to about 40%, about 40% to about 50%, about 50% to about 60%, about 60% to about 70%, about 70% to about 80%, about 80% to about 90%, or about 90% to about 100% alpha-S1-casein. In some embodiments, about 20% to about 30%, about 30% to about 40%, about 40% to about 50%, about 50% to about 60%, about 60% to about 70%, about 70% to about 80%, about 80% to about 90%, or about 90% to about 100% of the casein protein in the solid-phase protein-stabilized emulsion is alpha-S1-casein.

[0382] In some embodiments, about 20% to about 100% of the casein protein in the solid-phase protein-stabilized emulsion is alpha-S2-casein. In some embodiments, about 50% to about 100% of the casein protein in the solid-phase protein-stabilized emulsion is alpha-S2-casein. For example, the emulsion may comprise about 20% to about 30%, about 30% to about 40%, about 40% to about 50%, about 50% to about 60%, about 60% to about 70%, about 70% to about 80%, about 80% to about 90%, or about 90% to about 100% alpha-S2-casein. In some embodiments, about 20% to about 30%, about 30% to about 40%, about 40% to about 50%, about 50% to about 60%, about 60% to about 70%, about 70% to about 80%, about 80% to about 90%, or about 90% to about 100% of the casein protein in the solid-phase protein-stabilized emulsion is alpha-S2-casein.

[0383] In some embodiments, a solid-phase protein-stabilized emulsion comprises about 8% (w/v) to about 25% (w/v) total protein, one or more lipids, and one or more salts; wherein at least 4% of the total protein comprises casein proteins selected from kappa-casein, para-kappa-casein, beta-casein, alpha-S1-casein, and alpha-S2-casein; wherein the emulsion has at least one of the following characteristics: i) a firmness of at least 150 grams; ii) a melting point of about 35° C. to about 100° C.; or iii) ability to stretch to at least 3 cm in length without breaking. In some embodiments, at least 20% to 100% of the casein protein is kappa casein. In some embodiments, at least 20% to 100% of the casein protein is para-kappa casein. In some embodiments, at least 50% to 100% of the casein protein is beta-casein. In some embodiments, at least 50% to 100% of the casein protein is alpha-S1-casein. In some embodiments, at least 20% to 100% of the casein protein is alpha-S2-casein. In some embodiments, casein protein is expressed in a plant. In some embodiments, the emulsion has a pH of about 5.2 to about 5.9. In some embodiments, the composition comprises only one, only two, only three, or only four casein proteins selected from kappa-casein, para-kappa-casein, beta-casein, alpha-S1-casein, and alpha-S2-casein. In some embodiments, the emulsion does not contain an organoleptically functional amount of beta-lactoglobulin. In some embodiments, the emulsion may comprise beta-lactoglobulin in the amount of about 0.01% (w/v) to about 0.1% (w/v), about 0.1% (w/v) to about 0.5% (w/v), about 0.5% (w/v) to about 1.0% (w/v), about 1.0% (w/v) to about 2% (w/v), about 2% (w/v) to about 3% (w/v), about 3% (w/v) to about 5% (w/v), about 5% (w/v) to about 10% (w/v), about 10% (w/v) to about 20% (w/v), about 20% (w/v) to about 40% (w/v), or more.

### Alternative Dairy Compositions Comprising One or More Isolated or Recombinant Casein Proteins

[0384] The milk or casein proteins described herein may also be used to prepare alternative dairy compositions. For example, in some embodiments, an alternative dairy composition comprises one or more casein proteins, such as recombinant casein proteins. In some embodiments, the casein proteins are selected from kappa-casein, para-kappa-casein, beta-casein, alpha-S1-casein and alpha-S2-casein. In some embodiments, the alternative dairy composition comprises only one casein protein. In some embodiments, the alterative diary composition comprises two, three, or four casein proteins.

[0385] In some embodiments, the disclosure relates to an alternative dairy composition comprising a casein protein selected from kappa-casein, para-kappa-casein, beta-casein, alpha-S1-casein, and alpha-S2-casein; and a beta-lactoglobulin. In some embodiments the casein protein is recombinant. In some embodiments, the beta-lactoglobulin is recombinant. In some embodiments, both the casein protein and the beta-lactoglobulin are recombinant. In some embodiments, the ratio of the casein protein to the beta-lactoglobulin is about 8:1 to about 1:2. In some embodiments, the ratio of the casein protein to the beta-lactoglobulin is about 8:1 to about 2:1.

[0386] In some embodiments, an alternative dairy composition comprises about 8% (w/v) to about 25% (w/v) total protein, such as about 8% to about 10%, about 10% to about 15%, about 15% to about 20%, or about 20 to about 25% total protein. In some embodiments, an alternative dairy composition comprises about 1% to about 10% (w/v) total protein. In some embodiments, an alternative dairy composition comprises about 25% to about 35%, about 35% to about 45%, about 45% to about 55%, about 55% to about 65%, about 65% to about 75% (w/v), or more total protein.

[0387] In some embodiments, about 1% to about 5% of the total protein in the alternative dairy composition is casein protein. In some embodiments, about 5% to about 10% of the total protein in the alternative dairy composition is casein protein. In some embodiments, about 10% to about 20% of the total protein in the alternative dairy composition is casein protein. In some embodiments, about 20% to about 30% of the total protein in the alternative dairy composition is casein protein. In some embodiments, about 30% to about 40% of the total protein in the alternative dairy composition is casein protein. In some embodiments, about 40% to about 50% of the total protein in the alternative dairy composition is casein protein. In some embodiments, about 50% to about 60% of the total protein in the alternative dairy composition is casein protein. In some embodiments, about 60% to about 70% of the total protein in the alternative dairy composition is casein protein. In some embodiments, about 70% to about 80% of the total protein in the alternative dairy composition is casein protein. In some embodiments, about 80% to about 90% of the total protein in the alternative dairy composition is casein protein. In some embodiments, about 90% to about 100% of the total protein in the alternative dairy composition is casein protein.

[0388] In some embodiments, at least 1%, at least 2%, at least 3%, at least 4%, at least 5%, at least 6%, at least 7%, at least 8%, at least 9%, at least 10%, at least 11%, at least 12%, at least 13%, at least 14%, at least 15%, at least 16%, at least 17%, at least 18%, at least 19%, at least 20%, or more of the total protein in the alternative dairy composition is casein protein.

[0389] In some embodiments, about 20% to about 100% of the casein protein in the alternative dairy composition is kappa casein. For example, the alternative dairy composition may comprise about 20% to about 30%, about 30% to about 40%, about 40% to about 50%, about 50% to about 60%, about 60% to about 70%, about 70% to about 80%, about 80% to about 90%, or about 90% to about 100% kappa casein. In some embodiments, about 20% to about 30%, about 30% to about 40%, about 40% to about 50%, about 50% to about 60%, about 60% to about 70%, about 70% to about 80%, about 80% to about 90%, or about 90% to about 100% of the casein protein in the alternative dairy composition is kappa casein.

[0390] In some embodiments, about 20% to about 100% of the casein protein in the alternative dairy composition is para-kappa casein. For example, the alternative dairy composition may comprise about 20% to about 30%, about 30% to about 40%, about 40% to about 50%, about 50% to about 60%, about 60% to about 70%, about 70% to about 80%, about 80% to about 90%, or about 90% to about 100% para-kappa casein. In some embodiments, about 20% to about 30%, about 30% to about 40%, about 40% to about 50%, about 50% to about 60%, about 60% to about 70%, about 70% to about 80%, about 80% to about 90%, or about 90% to about 100% of the casein protein in the alternative dairy composition is para-kappa casein.

[0391] In some embodiments, about 20% to about 100% of the casein protein in the alternative dairy composition is beta casein. In some embodiments, about 50% to about 100% of the casein protein in the alternative dairy composition is beta casein. For example, the alternative dairy composition may comprise about 20% to about 30%, about 30% to about 40%, about 40% to about 50%, about 50% to about 60%, about 60% to about 70%, about 70% to about 80%, about 80% to about 90%, or about 90% to about 100% beta casein. In some embodiments, about 20% to about 30%, about 30% to about 40%, about 40% to about 50%, about 50% to about 60%, about 60% to about 70%, about 70% to about 80%, about 80% to about 90%, or about 90% to about 100% of the casein protein in the alternative dairy composition is beta casein.

[0392] In some embodiments, about 20% to about 100% of the casein protein in the alternative dairy composition is alpha-S1-casein. In some embodiments, about 50% to about 100% of the casein protein in the alternative dairy composition is alpha-S1-casein. For example, the alternative dairy composition may comprise about 20% to about 30%, about 30% to about 40%, about 40% to about 50%, about 50% to about 60%, about 60% to about 70%, about 70% to about 80%, about 80% to about 90%, or about 90% to about 100% alpha-S1-casein. In some embodiments, about 20% to about 30%, about 30% to about 40%, about 40% to about 50%, about 50% to about 60%, about 60% to about 70%, about 70% to about 80%, about 80% to about 90%, or about 90% to about 100% of the casein protein in the alternative dairy composition is alpha-S1-casein.

[0393] In some embodiments, about 20% to about 100% of the casein protein in the alternative dairy composition is alpha-S2-casein. In some embodiments, about 50% to about 100% of the casein protein in the alternative dairy composition is alpha-S2-casein. For example, the alternative dairy composition may comprise about 20% to about 30%, about 30% to about 40%, about 40% to about 50%, about 50% to about 60%, about 60% to about 70%, about 70% to about 80%, about 80% to about 90%, or about 90% to about 100% alpha-S2-casein. In some embodiments, about 20% to about 30%, about 30% to about 40%, about 40% to about 50%, about 50% to about 60%, about 60% to about 70%, about 70% to about 80%, about 80% to about 90%, or about 90% to about 100% of the casein protein in the alternative dairy composition is alpha-S2-casein.

[0394] In some embodiments, an alternative dairy composition comprises kappa casein and essentially no para-kappa casein. For example, in some embodiments, the alternative dairy composition comprises less than about 1%, less than about 0.9%, less than about 0.8%, less than about 0.7%, less than about 0.6%, less than about 0.5%, less than about 0.4%, less than about 0.3%, less than about 0.2%, or less than about 0.1%, para-kappa casein. In some embodiments, the alternative dairy composition comprises about 0.01% to about 1%, about 0.010% to about 0.9%, about 0.010% to about 0.8%, about 0.010% to about 0.7%, about 0.010% to about 0.6%, about 0.1% to about 0.5%, about 0.1% to about 0.4%, about 0.1% to about 0.3%, about 0.1% to about 0.2%, or about 0.01% to about 0.1% para-kappa casein. In some embodiments, the kappa casein is recombinant. In some embodiments, the kappa casein is expressed in a plant. In some embodiments, the kappa casein is expressed in a soybean plant.

[0395] In some embodiments, an alternative dairy composition comprises one to four recombinant milk proteins, each selected from kappa-casein, para-kappa-casein, beta-casein, alpha-S1-casein, and alpha-S2-casein. In some embodiments, an alternative dairy composition comprises 1, 2, 3, or 4 casein proteins. In some embodiments, an alternative dairy composition comprises only one casein protein.

[0396] In some embodiments, an alternative dairy composition comprises recombinant beta-casein and at least one lipid and does not comprise an organoleptically functional amount of beta-lactoglobulin. In some embodiments, the composition does not comprise any additional casein proteins. In some embodiments, the composition comprises at least one additional casein protein. In some embodiments, the at least one additional casein protein is selected from kappa-casein, para-kappa-casein, alpha-S1-casein and alpha-S2-casein. In some embodiments, the at least one additional casein is kappa-casein or para-kappa-casein. In some embodiments, at least 50%, at least 75%, or at least 90% by weight of the total casein protein in an alternative dairy composition is beta-casein. In some embodiments, the beta-casein is expressed in a plant. In some embodiments, the beta-casein is expressed in a soybean plant. In some embodiments, all caseins in the composition are plant expressed. In some embodiments, the composition comprises a fusion protein comprising recombinant beta-casein.

[0397] In some embodiments, the alternative dairy composition comprises two of the milk proteins selected from kappa-casein, para-kappa-casein, beta-casein, alpha-S1-casein, and alpha-S2-casein. In some embodiments, the alternative dairy composition comprises three of the milk proteins selected from kappa-casein, para-kappa-casein, beta-casein, alpha-S1-casein, and alpha-S2-casein. In some embodiments, the alternative dairy composition comprises four of the milk proteins selected from kappa-casein, para-kappa-casein, beta-casein, alpha-S1-casein, and alpha-S2-casein. In some embodiments, the one or more milk protein(s) is(are) plant-expressed. In some embodiments, the milk protein(s) is(are) expressed in a soybean plant. In some embodiments, the milk protein(s) is(are) yeast- or bacterial-expressed. Exemplary combinations of 1, 2, 3, or 4 casein proteins that may be used in the alternative dairy compositions described herein are shown above in Table 12.

[0398] In some embodiments, the disclosure relates to an alternative dairy composition comprising one to four plant-expressed recombinant milk proteins (i.e., 2, 3, or 4 plant-expressed recombinant milk proteins), wherein the recombinant milk proteins confer one, two, three or more organoleptic properties similar to a dairy composition (i.e., a dairy composition comprising mammalian milk such as bovine milk) selected from the group consisting of taste, appearance, mouthfeel, structure, texture, density, elasticity, springiness, coagulation, binding, leavening, aeration, foaming, creaminess, and emulsification. In some embodiments, the plant-expressed milk proteins are selected from beta lactoglobulin, kappa-casein, para-kappa-casein, beta-casein, alpha-S1-casein, and alpha-S2-casein. In some embodiments, the recombinant beta-casein protein confers on the alternative dairy composition one, two, or more characteristics of a dairy food product selected from the group consisting of: taste, aroma, appearance, handling, mouthfeel, density, structure, texture, elasticity, springiness, coagulation, binding, leavening, aeration, foaming, creaminess and emulsification.

[0399] In some embodiments, the alternative dairy compositions described above comprise at least one additional mammalian or plant protein that is not a casein protein. Examples of combinations of casein, mammalian, and/or plant proteins are shown above in Table 12.

[0400] In some embodiments, the alternative dairy compositions described herein may comprise plant protein. For example, in some embodiments, the alternative dairy compositions comprise protein from a legume, such as, for example, soybeans, chickpeas, kidney beans, black beans, pinot beans, green peas, and lentils. In some embodiments, the alternative dairy compositions comprise protein from a grain, such as, for example, wheat, millet, barley, oats, rice, spelt, teff, amaranth, and quinoa. In some embodiments, the alternative dairy compositions comprise protein from nuts, hempseed, chia seed, nutritional yeast, or spirulina. In some embodiments, the alternative diary composition comprises protein from potato. In some embodiments, the alternative diary composition comprises protein from a plant of the family Fabaceae.

[0401] In some embodiments, the alternative dairy compositions described above have at least one of the following characteristics: i) a firmness of at least 150 grams; ii) a melting point of about 35° C. to about 100° C.; or iii) ability to stretch to at least 3 cm in length without breaking. In some embodiments, the alternative diary compositions described above have the ability to stretch to at least 4 cm, at least 5 cm, at least 6 cm, at least 7 cm, at least 8 cm, at least 9 cm, at least 10 cm, at least 11 cm, at least 12 cm, at least 13 cm, at least 14 cm, at least 15 cm, at least 16 cm, at least 17 cm, at least 18 cm, at least 19 cm, or at least 10 cm in length without breaking. In some embodiments, the alternative dairy compositions described above have the ability to stretch to at least 5 cm in length without breaking. Testing methods and ranges firmness, melting point, and stretch are disclosed above.

[0402] In some embodiments, the alternative diary compositions comprise ash. In some embodiments, the alternative dairy compositions comprise at least one lipid and/or at least one salt. Examples of lipids include fatty acids (saturated and unsaturated); glycerides or glycerolipids (such as monoglycerides, diglycerides, triglycerides or neutral fats, and phosphoglycerides or glycerophospholipids); and nonglycerides (sphingolipids, tocopherols, tocotrienols, sterol lipids including cholesterol and steroid hormones, prenol lipids including terpenoids, fatty alcohols, waxes, and polyketides).

[0403] Examples of lipids that may be included in the alternative dairy compositions include, for example, dairy fats or vegetable oils such as palm oil or palm kernel oil, soybean oil, corn oil, rapeseed oil, canola oil, sunflower oil, safflower oil, coconut oil, rice bran oil, olive oil, sesame oil, flaxseed oil, hemp oil, cottonseed oil, peanut oil, almond oil, beech nut oil, brazil nut oil, cashew oil, hazelnut oil, macadamia oil, mongongo nut oil, pecan oil, pine nut oil, pistachio oil, walnut oil, pumpkin seed oil, grapefruit seed oil, lemon oil, apricot oil, apple seed oil, argan oil, avocado oil, or orange oil. In some embodiments, the solid-phase, protein stabilized emulsion comprises butter or margarine.

[0404] Examples of salts that may be included in the alternative dairy composition include, but are not limited to, magnesium chloride, sodium chloride, calcium chloride, sodium phosphate and trisodium citrate.

[0405] In some embodiments, the alternative dairy compositions do not contain an organoleptically functional amount of beta-lactoglobulin. In some embodiments, the alternative dairy composition may comprise beta-lactoglobulin in the amount of about 0.01% (w/v) to about 0.1% (w/v), about 0.1% (w/v) to about 0.5% (w/v), about 0.5% (w/v) to about 1.0% (w/v), about 1.0% (w/v) to about 2% (w/v), about 2% (w/v) to about 3% (w/v), about 3% (w/v) to about 5% (w/v), about 5% (w/v) to about 10% (w/v), about 10% (w/v) to about 20% (w/v), about 30% (w/v) to about 40% (w/v), or more, of the composition.

[0406] In some embodiments, the alternative dairy compositions comprise one or more recombinant casein proteins that are expressed in a microorganism. In some embodiments, the recombinant casein protein is yeast-expressed or bacterial-expressed. In some embodiments, the recombinant casein protein is expressed in a bacterium. Microorganisms used for recombinant protein production are well known in the art (see for example, Ferrer-Miralles et al., Bacterial cell factories for recombinant protein production; expanding the catalogue, 2013, Microb Cell Fact. 2013; 12:113). For example, the recombinant casein protein may be expressed in a bacteria such as Escherichia coli, Caulobacter crescentus, Rodhobacter sphaeroides, Pseudoalteromonas haloplanktis, Shewanella sp., Pseudomonas putida, P. aeruginosa, P. fluorescens, Halomonas elongate, Chromohalobacter salexigens, Streptomyces lividans, S. griseus, Nocardia lactamdurans, Mycobacterium smegmatis, Corynebacterium glutamicum, C. ammoniagenes, Brevibacterium lactofermentum, Bacillus subtilis, B. brevis, B. megaterium, B. licheniformis, B. amyloliquefaciens, Lactococcus lactis, L. plantarum, L. casei, L. reuteri, or L. gasseri.

[0407] In some embodiments, the recombinant casein proteins are expressed in a microorganism that is a eukaryotic cell, such as Saccharomyces spp., Kluyveromyces spp., Pichia spp., Aspergillus spp., Tetrahymena spp., Yarrowla spp., Hansenula spp., Blastobotrys spp., Candida spp., Zygosaccharomyces spp., Debrayomyces spp., Fusarium spp., and Trichoderma spp.

[0408] In some embodiments, the one or more recombinant casein proteins are expressed in a plant. In some embodiments, the plant may be a monocot selected from turf grass, maize (corn), rice, oat, wheat, barley, sorghum, orchid, iris, lily, onion, palm, and duckweed. In some embodiments, the plant is a dicot selected from Arabidopsis, tobacco, tomato, potato, sweet potato, cassava, alfalfa, lima bean, pea, chickpea, soybean, carrot, strawberry, lettuce, oak, maple, walnut, rose, mint, squash, daisy, Quinoa, buckwheat, mung bean, cow pea, lentil, lupin, peanut, fava bean, French beans (i.e., common beans), mustard, or cactus. In some embodiments, the plant is a non-vascular plant selected from moss, liverwort, hornwort or algae. In some embodiments, the plant is a vascular plant reproducing from spores (e.g., a fern). In some embodiments, the recombinant casein protein is expressed in a soybean plant.

[0409] In some embodiments, the alternative dairy compositions described above have a pH of about 2 to about 8. In some embodiments, the alternative dairy compositions described above have a pH of about 4 to about 8. Table 13 below shows exemplary ranges of pH for common mammalian derived dairy products.

TABLE 13
pH ranges of common dairy products

| Dairy product | pH range |
|---|---|
| Milk | 6.7-6.9 |
| Butter | 6.1-6.4 |
| Yogurt | 2.0-4.5 |
| Brie | 6.0-6.5 |
| Cheddar | 5.1-5.3 |
| Cream cheese | 4.6-5.1 |
| Feta | 4.1-4.5 |
| Parmesan | 5.2-5.3 |
| Ricotta | 6.0 |

[0410] Examples of alternative dairy compositions that may be produced as described herein include, but are not limited to, alternative versions of milk, cream, butter, and cheese. Other example alternative dairy compositions include ice cream, frozen desserts, frozen yogurt or custard, yogurt, cottage cheese, cream cheese, curds, crème fraiche, toppings, icings, fillings, low-fat spreads, dairy-based dry mixes, geriatric nutrition compositions, coffee creamers, analog dairy products, follow-up formula, baby formula, infant formula, milk, dairy beverages, acid dairy drinks, smoothies, milk tea, margarine, butter alternatives, growing up milks, low-lactose products, buttermilk, sour cream, skyr, leben, lassi, kefir, and beverages. In some embodiments, the alternative diary compositions may be cultured milks, such as drinkable yogurts. The alternative dairy compositions may also be powders containing a milk protein, or a low-lactose product. An illustrative method for preparing an alternative dairy composition is provided in FIG. 13.

[0411] An alternative milk composition may be produced, for example, by mixing a liquid comprising at least one isolated or recombinant milk or casein protein, with ash, lipids, and/or a sweetener, and optionally one or more flavor compounds and/or color agents. In some embodiments, one or more vitamins are added to the alternative milk composition, such as retinal, carotene, vitamins, vitamin D, vitamin E, vitamin B12, thiamin, or riboflavin. This milk alternative may then be used to produce, for example, butter, ice cream, frozen desserts, frozen yogurt or custard, yogurt, cottage cheese, cream cheese, curds, tofu, and crème fraiche.

[0412] In some embodiments, the alternative dairy composition comprises one or more sweeteners. Examples of sweeteners include, but are not limited to, saccharides, such as glucose, mamiose, maltose, fructose, galactose, lactose, sucrose, monatin, and tagatose. In some embodiments the sweetener is selected from stevia, aspartame, cyclamate, saccharin, sucralose, mogrosides, brazzein, curculin, erythritol, glycyrrhizin, inulin, isomalt, lacititol, mabinlin, malititol, mamiitol, miraculin, monatin, monelin, osladin, pentadin, sorbitol, thaumatin, xylitol, acesulfame, potassium, advantame, alitame, aspartame-acesulfame, sodium cyclamate, dulcin, glucin, neohesperidin, dihyrdochalcone, neotame, and P-4000.

[0413] In some embodiments, an alternative dairy food composition comprises calcium. In some embodiments, the composition comprises calcium at a concentration of about 0% to about 2% by weight. In some embodiments, the composition comprises calcium at a concentration of about 0.001% to about 2% by weight. In some embodiments, the composition comprises calcium at a concentration of about 0.01% to about 2% by weight. In some embodiments, the composition comprises calcium at a concentration of about 0.1% to about 2% by weight. In some embodiments, the composition comprises calcium at a concentration of about 1% to about 2% by weight. In some embodiments, the composition comprises calcium at a concentration of about 0.01%, about 0.02%, about 0.03%, about 0.04%, about 0.05%, about 0.06%, about 0.07%, about 0.08%, about 0.09%, about 0.1%, about 0.2%, about 0.3%, about 0.4%, about 0.5%, about 0.6%, about 0.7%, about 0.8%, about 0.9%, about 1.0%, about 1.1%, about 1.2%, about 1.3%, about 1.4%, about 1.5%, about 1.6%, about 1.7%, about 1.8%, about 1.9%, or about 2.0% by weight.

[0414] Thus, in some embodiments, the alternative dairy composition is a milk composition. In some embodiments, the alternative dairy composition is a cheese composition. In some embodiments, the alternative dairy composition is cream composition. In some embodiments, the alternative dairy composition is a yogurt composition (e.g., a frozen yogurt composition, a sugar-free yogurt composition, a low-fat yogurt composition, a Greek yogurt composition, a drinkable yogurt composition, etc.). In some embodiments, the alternative dairy composition is ice cream. In some embodiments, alternative dairy composition is a frozen custard composition. In some embodiments, the alternative dairy composition is a frozen dessert. In some embodiments, the alternative dairy composition is a crème fraiche composition. In some embodiments, the alternative dairy composition is curd composition. In some embodiments, the alternative dairy composition is a cottage cheese composition. In some embodiments, the alternative dairy composition is cream composition. In some embodiments, the alternative dairy composition is a sour cream composition.

### Cheese Compositions

[0415] Traditionally, cheese is made with milk, which comprises a number of proteins including various casein proteins (see Table 14 below for exemplary compositions of human and cow milk). Coagulation of the milk proteins occurs by way of an acid and/or rennet addition, which causes the milk to curdle. Rennet is a bacterial enzyme that cleaves kappa-casein, generating para-kappa-casein, which then links up with the calcium and phosphate present in milk to join casein micelles together. These solids curds are collected and/or separated from the liquid (whey) and various procedures of pressing, forming, and aging yield different cheese products.

TABLE 14
Illustrative Milk Protein Compositions

| | Human milk | Bovine (cow) milk |
|---|---|---|
| Protein | (mg/mL) | (mg/mL) |
| α-lactalbumin | 2.2 | 1.2 |
| α-s1-casein | 0 | 11.6 |
| α-s2-casein | 0 | 3.0 |
| β-casein | 2.2 | 9.6 |
| κ-casein | 0.4 | 3.6 |
| γ-casein | 0 | 1.6 |
| Immunoglobulins | 0.8 | 0.6 |
| Lactoferrin | 1.4 | 0.3 |
| β-lactoglobulin | 0 | 3.0 |
| Lysozyme | 0.5 | Traces |
| Serum albumin | 0.4 | 0.4 |
| Other | 0.8 | 0.6 |

[0416] Described herein are cheese compositions comprising a different protein composition compared to that of any mammalian milk (i.e., a non-naturally occurring protein composition). For example, in some embodiments, a cheese composition can be prepared using only one milk protein. In some embodiments, a cheese composition can be prepared using only two milk proteins. In some embodiments, a cheese composition may be prepared using only three milk proteins. In some embodiments, a cheese composition may be prepared using only four milk proteins. In some embodiments, a cheese composition comprises one or more milk proteins at a ratio that is not found in any mammalian milk (e.g., a non-naturally occurring ratio).

[0417] In some embodiments, a cheese composition comprises one milk protein, which may be derived from animal-produced milk, or recombinantly expressed. In some embodiments, a cheese composition comprises two, three, our four milk proteins, wherein each milk protein is derived from animal-produced milk or is recombinantly expressed. In some embodiments, the milk protein is a casein protein.

[0418] In some embodiments, a cheese composition may comprise beta-casein as the only casein protein (i.e., 100% beta-casein). In some embodiments, a cheese composition comprises beta-casein and at least one additional casein protein. In some embodiments, the at least one additional casein protein is selected from kappa-casein, para-kappa-casein, beta-casein, alpha-S1-casein and alpha-S2-casein. In some embodiments, the at least one additional casein protein is kappa-casein. In some embodiments, the at least one additional casein protein is para-kappa-casein.

[0419] In some embodiments, a cheese composition comprises two or more casein proteins, wherein about 95% by weight of the casein protein in the composition is beta-casein. In some embodiments, a cheese composition comprises two or more casein proteins, wherein about 90% by weight of the casein protein in the composition is beta-casein. In some embodiments, a cheese composition comprises two or more casein proteins, wherein about 85% by weight of the casein protein in the composition is beta-casein. In some embodiments, a cheese composition comprises two or more casein proteins, wherein about 80% by weight of the casein protein in the composition is beta-casein. In some embodiments, a cheese composition comprises two or more casein proteins, wherein about 75% by weight of the casein protein in the composition is beta-casein. In some embodiments, a cheese composition comprises two or more casein proteins, wherein about 70% by weight of the casein protein in the composition is beta-casein. In some embodiments, a cheese composition comprises two or more casein proteins, wherein about 65% by weight of the casein protein in the composition is beta-casein. In some embodiments, a cheese composition comprises two or more casein proteins, wherein about 60% by weight of the casein protein in the composition is beta-casein. In some embodiments, a cheese composition comprises two or more casein proteins, wherein about 55% by weight of the casein protein in the composition is beta-casein. In some embodiments, a cheese composition comprises two or more casein proteins, wherein about 50% by weight of the casein protein in the composition is beta-casein.

[0420] In some embodiments, a cheese composition may comprise 95%, beta-casein and 5% of one or more additional casein proteins. In some embodiments, it may comprise 90%, beta-casein and 10% of one or more additional casein proteins. In some embodiments, it may comprise 85%, beta-casein and 15% of one or more additional casein proteins. In some embodiments, it may comprise 80%, beta-casein and 20% of one or more additional casein proteins. In some embodiments, it may comprise 75%, beta-casein and 25% of one or more additional casein proteins. In some embodiments, it may comprise 70%, beta-casein and 30% of one or more additional casein proteins. The other casein proteins may be kappa-casein, para-kappa-casein, alpha-S1-casein, and/or alpha-S2-casein.

[0421] In some embodiments, the cheese composition comprises 75% beta-casein and 25% alpha caseins (i.e., a mixture of alpha-S1-casein and alpha-S2-casein). In some embodiments, the cheese composition comprises 75% beta-casein and 25% kappa-casein. In some embodiments, the cheese composition comprises 50% beta-casein and 50% kappa-casein. In some embodiments, the cheese composition comprises 50% beta-casein and 50% alpha caseins.

[0422] In some embodiments the beta-casein is recombinant beta-casein. In some embodiments, the recombinant beta-casein protein is plant-expressed. In some embodiments, the recombinant beta-casein is expressed in a soybean. In some embodiments, all the caseins in the cheese composition are plant-expressed. In some embodiments, the recombinant casein protein is derived from a fusion protein. In some embodiments, the cheese composition does not contain an organoleptically functional amount of beta-lactoglobulin.

[0423] In some embodiments, a cheese composition comprises para-kappa-casein produced without the use of any enzyme that cleaves kappa-casein to para-kappa-casein. In some embodiments, a cheese composition comprises para-kappa-casein produced without the use of any acid that cleaves kappa-casein to para-kappa-casein. In some embodiments, a cheese composition comprises para-kappa-casein produced without the use of any enzyme or acid that cleaves kappa-casein to para-kappa-casein. In some embodiments, a cheese composition comprises a recombinantly expressed para-kappa-casein. In some embodiments, a cheese composition comprises substantially no casein, such as 0.01% (w/v) to 0.1% (w/v) or 0.1% (w/v) to 0.1% (w/v) casein.

[0424] In some embodiments, a cheese composition comprises about 8% (w/v) to about 25% (w/v) total protein, such as about 8% to about 10%, about 10% to about 15%, about 15% to about 20%, or about 20 to about 25% total protein. In some embodiments, a cheese composition comprises about 1% to about 10% (w/v) total protein. In some embodiments, a cheese composition comprises about 25% to about 35%, about 35% to about 45%, about 45% to about 55%, about 55% to about 65%, about 65% to about 75% (w/v), or more total protein.

[0425] In some embodiments, about 1% to about 5% of the total protein in the cheese composition is casein protein. In some embodiments, about 5% to about 10% of the total protein in the cheese composition is casein protein. In some embodiments, about 10% to about 20% of the total protein in the cheese composition is casein protein. In some embodiments, about 20% to about 30% of the total protein in the cheese composition is casein protein. In some embodiments, about 30% to about 40% of the total protein in the cheese composition is casein protein. In some embodiments, about 40% to about 50% of the total protein in the cheese composition is casein protein. In some embodiments, about 50% to about 60% of the total protein in the cheese composition is casein protein. In some embodiments, about 60% to about 70% of the total protein in the cheese composition is casein protein. In some embodiments, about 70% to about 80% of the total protein in the cheese composition is casein protein. In some embodiments, about 80% to about 90% of the total protein in the cheese composition is casein protein. In some embodiments, about 90% to about 100% of the total protein in the cheese composition is casein protein.

[0426] In some embodiments, at least 1%, at least 2%, at least 3%, at least 4%, at least 5%, at least 6%, at least 7%, at least 8%, at least 9%, at least 10%, at least 11%, at least 12%, at least 13%, at least 14%, at least 15%, at least 16%, at least 17%, at least 18%, at least 19%, at least 20%, or more of the total protein in the cheese composition is casein protein.

[0427] In some embodiments, about 20% to about 100% of the casein protein in the cheese composition is kappa casein. For example, the cheese composition may comprise about 20% to about 30%, about 30% to about 40%, about 40% to about 50%, about 50% to about 60%, about 60% to about 70%, about 70% to about 80%, about 80% to about 90%, or about 90% to about 100% kappa casein. In some embodiments, about 20% to about 30%, about 30% to about 40%, about 40% to about 50%, about 50% to about 60%, about 60% to about 70%, about 70% to about 80%, about 80% to about 90%, or about 90% to about 100% of the casein protein in the cheese composition is kappa casein.

[0428] In some embodiments, about 20% to about 100% of the casein protein in the cheese composition is para-kappa casein. For example, the cheese composition may comprise about 20% to about 30%, about 30% to about 40%, about 40% to about 50%, about 50% to about 60%, about 60% to about 70%, about 70% to about 80%, about 80% to about 90%, or about 90% to about 100% para-kappa casein. In some embodiments, about 20% to about 30%, about 30% to about 40%, about 40% to about 50%, about 50% to about 60%, about 60% to about 70%, about 70% to about 80%, about 80% to about 90%, or about 90% to about 100% of the casein protein in the cheese composition is para-kappa casein.

[0429] In some embodiments, about 20% to about 100% of the casein protein in the cheese composition is beta casein. In some embodiments, about 50% to about 100% of the casein protein in the cheese composition is beta casein. For example, the cheese composition may comprise about 20% to about 30%, about 30% to about 40%, about 40% to about 50%, about 50% to about 60%, about 60% to about 70%, about 70% to about 80%, about 80% to about 90%, or about 90% to about 100% beta casein. In some embodiments, about 20% to about 30%, about 30% to about 40%, about 40% to about 50%, about 50% to about 60%, about 60% to about 70%, about 70% to about 80%, about 80% to about 90%, or about 90% to about 100% of the casein protein in the cheese composition is beta casein.

[0430] In some embodiments, about 20% to about 100% of the casein protein in the cheese composition is alpha-S1-casein. In some embodiments, about 50% to about 100% of the casein protein in the cheese composition is alpha-S1-casein. For example, the cheese composition may comprise about 20% to about 30%, about 30% to about 40%, about 40% to about 50%, about 50% to about 60%, about 60% to about 70%, about 70% to about 80%, about 80% to about 90%, or about 90% to about 100% alpha-S1-casein. In some embodiments, about 20% to about 30%, about 30% to about 40%, about 40% to about 50%, about 50% to about 60%, about 60% to about 70%, about 70% to about 80%, about 80% to about 90%, or about 90% to about 100% of the casein protein in the cheese composition is alpha-S1-casein.

[0431] In some embodiments, about 20% to about 100% of the casein protein in the cheese composition is alpha-S2-casein. In some embodiments, about 50% to about 100% of the casein protein in the cheese composition is alpha-S2-casein. For example, the cheese composition may comprise about 20% to about 30%, about 30% to about 40%, about 40% to about 50%, about 50% to about 60%, about 60% to about 70%, about 70% to about 80%, about 80% to about 90%, or about 90% to about 100% alpha-S2-casein. In some embodiments, about 20% to about 30%, about 30% to about 40%, about 40% to about 50%, about 50% to about 60%, about 60% to about 70%, about 70% to about 80%, about 80% to about 90%, or about 90% to about 100% of the casein protein in the cheese composition is alpha-S2-casein.

[0432] In some embodiments, a cheese composition comprises a stable, protein-stabilized emulsion described herein. In some embodiments, a cheese composition comprises more than one of the stable, protein-stabilized emulsions described herein. In some embodiments, a cheese composition is made using at least one stable, protein-stabilized emulsion described herein.

[0433] In some embodiments, a cheese composition comprises a colloidal suspension described herein. In some embodiments, a cheese composition comprises more than one colloidal suspension described herein. In some embodiments, a cheese composition is made using at least one of the colloidal suspensions described herein.

[0434] In some embodiments, a cheese composition described herein may comprise plant protein. For example, in some embodiments, the cheese composition comprises protein from a legume, such as, for example, soybeans, chickpeas, kidney beans, black beans, pinto beans, green peas, and lentils. In some embodiments, the cheese composition comprises protein from a grain, such as, for example, wheat, millet, barley, oats, rice, spelt, teff, amaranth, and quinoa. In some embodiments, the cheese composition comprises protein from nuts, hempseed, chia seed, nutritional yeast, or spirulina. In some embodiments, the cheese composition comprises protein from potato. In some embodiments, the cheese composition comprises protein from a plant of the family Fabaceae.

[0435] In some embodiments, the cheese compositions described herein may be substantially transparent. As used herein, “substantially transparent” means having an opacity of about 50%, about 40%, about 30%, about 20%, about 10% or less. In some embodiments, the cheese composition has about 0% opacity. In some embodiments, the cheese compositions described herein are substantially transparent when in solid form. In some embodiments, the cheese compositions described herein are substantially transparent when melted.

[0436] In some embodiments, the cheese compositions described herein may have at least one, at least two, or at least three desirable organoleptic properties. In some embodiments, the cheese compositions described herein may have at least one, at least two, or at least three organoleptic properties that is similar to that of cheese (i.e., cheese produced using mammalian milk, such as bovine milk or goat milk). For example, in some embodiments, the cheese compositions may have at least one, at least two, or at least three organoleptic properties found in the cheeses of Table 15 or Table 16.

[0437] In some embodiments, the cheese compositions described herein may be used in a similar manner (e.g., for cooking, etc.) as one or more of the cheeses listed in Table 15 or Table 16. In some embodiments, the cheese compositions described herein may be used as a substitute for one or more of the cheeses listed in Table 15 or Table 16.

TABLE 15
Illustrative types of cheese

| Category | Examples |
|---|---|
| Soft Fresh Cheeses | Cottage Cheese |
| | Cream Cheese |
| | Feta |
| | Mascarpone |
| | Neufchâtel |
| | Queso Blanco |
| | Ricotta |
| Soft-Ripened Cheeses | Brie (single, double and triple cream and |
| | flavored) |
| | Camembert |
| Semi-Soft Chesses | Brick, dry- and washed-rind |
| | Fontina |
| | Havarti |
| | Limburger |
| | Monterey Jack |
| | Muenster |
| | Pepper Jack |
| Blue-Veined Cheeses | Blue Cheese |
| | Gorgonzola, creamy style |
| | Gorgonzola, crumbly style |
| Gouda & Edam | Gouda |
| | Smoked Gouda |
| | Edam |
| Pasta Filata and Related | Fresh Mozzarella |
| Cheeses | Low-Moisture, Part-Skim Mozzarella |
| | Low-Moisture, Whole Milk Mozzarella |
| | Part-Skim Mozzarella |
| | Whole Milk Mozzarella |
| | Provolone, mild, aged and smoked |
| | String Cheese |
| | Pizza Cheese |
| | Individually Quick Frozen mozzarella (IQF) |
| Cheddar & Colby | Cheddar |
| | Smoked Cheddar |
| | Colby |
| Swiss Cheeses | Baby Swiss |
| | Swiss |
| | Gruyère |
| Hard Cheeses | Asiago |
| | Parmesan |
| | Romano |
| | Pepato |
| Process Cheeses | Pasteurized Process Cheese |
| | Pasteurized Process Cheese Food |
| | Pasteurized Process Cheese Spread |
| | Pasteurized Process Cheese Product |
| | Cold-Pack |
| | High-Melt Cheeses |
| Powder & Enzyme- | Cheese Powders |
| modified Cheeses | Enzyme Modified Cheeses (EMCs) |
| Custom & Convenience | Pre-blends |
| Cheese Products | Pre-cut Cheese |
| | Shredded Cheese |
| | Grated Cheese |
| | Cheese Sauce |
| | Portion Packaged Cheese |
| Cheeses for Special Needs | Low-fat Cheeses |
| | No-fat Cheeses |
| | Low-sodium Cheeses |
| | Kosher Cheeses |
| | Halal Cheeses |
| | Organic Cheeses |

[0438] Cheese may also be categorized based on moisture content. Shown below in Table 16 are example categories of cheeses and their respective moisture content (from Jana A H et al., J. Food Sci Technol (2017) 54(12):3776-3778).

TABLE 16
Moisture content of cheeses

| | Moisture | |
|---|---|---|
| Cheese type | content (%) | Examples |
| Soft cheese | 50-80 | Cottage, Quark, Baker's, Mozzarella, |
| | | Camembert, Feta |
| Semi-soft cheese | 39-50 | Blue, Limburger, Provolone, Tilsiter |
| Hard cheese | Max. 39 | Cheddar, Colby, Edam, Swiss, Gouda |
| Very hard cheese | Max. 34 | Parmesan, Romano, Sardo, Grana |

[0439] In some embodiments, a cheese composition described herein has a moisture content of between about 30% and about 80%. In some embodiments, a cheese composition described herein has between about 45% to 60% moisture content.

[0440] Cheese and cheese compositions have functional properties such as moisture content, firmness, stretchability, melting, viscosity/flow, oiling off, browning/blistering, whitening/decolorization, spreadability, grating, slicing, dicing, shredding/mincing, mouthfeel, flavor, aroma, freezing ability, and overall appearance. These properties can be determined by any number of means well known in the art.

[0441] Firmness and stretch may be analyzed as described above. Moisture content may be measured for example, as described in Bradley, R. L., Jr., and M. A. Vanderwarn. 2001, Determination of moisture in cheese and cheese products, J. AOAC 84:570-592. Texture may be analyzed as described in Kapoor et al., 2005, Small-scale manufacture of process cheese using a rapid visco analyzer, J. Dairy Sci. 88:3382-3391, using a TA.XT2 Texture Analyzer (see also Drake et al., 1999 Relationship between instrumental and sensory measurements of cheese texture, J. Texture Stud. 30:451-476) or for example by Breene 1975, Application of texture profile analysis to instrumental food texture evaluation, J. Texture Stud. 6:53-82.

[0442] In some embodiments, a cheese composition has the ability to stretch to at least 3 cm in length without breaking, as determined by heating a 100 gram mass of the composition at a temperature of 225° C. for 4 minutes and cooling to about 90° C. and pulling with a fork placed beneath the mass. In some embodiments, a cheese composition has the ability to stretch to at least 4 cm in length without breaking, as determined by heating a 100 gram mass of the composition at a temperature of 225° C. for 4 minutes and cooling to about 90° C. and pulling with a fork placed beneath the mass. In some embodiments, a cheese composition has the ability to stretch to at least 5 cm in length without breaking, as determined by heating a 100 gram mass of the composition at a temperature of 225° C. for 4 minutes and cooling to about 90° C. and pulling with a fork placed beneath the mass. In some embodiments, a cheese composition has the ability to stretch to at least 6 cm in length without breaking, as determined by heating a 100 gram mass of the composition at a temperature of 225° C. for 4 minutes and cooling to about 90° C. and pulling with a fork placed beneath the mass. In some embodiments, a cheese composition has the ability to stretch to at least 9 cm in length without breaking, as determined by heating a 100 gram mass of the composition at a temperature of 225° C. for 4 minutes and cooling to about 90° C. and pulling with a fork placed beneath the mass. In some embodiments, a cheese composition has the ability to stretch to at least 12 cm in length without breaking, as determined by heating a 100 gram mass of the composition at a temperature of 225° C. for 4 minutes and cooling to about 90° C. and pulling with a fork placed beneath the mass. In some embodiments, a cheese composition has the ability to stretch to at least 15 cm in length without breaking, as determined by heating a 100 gram mass of the composition at a temperature of 225° C. for 4 minutes and cooling to about 90° C. and pulling with a fork placed beneath the mass. In some embodiments, a cheese composition has the ability to stretch to at least 18 cm in length without breaking, as determined by heating a 100 gram mass of the composition at a temperature of 225° C. for 4 minutes and cooling to about 90° C. and pulling with a fork placed beneath the mass.

[0443] In some embodiments, a cheese composition described herein has a firmness of at least 150 grams, as determined by compressing a cylindrical-shaped sample of the cheese composition having a height of 3 cm and a diameter of 3 cm to a height of 1.5 cm at 5° C. In some embodiments, a cheese composition described herein has a firmness of at least 300 grams, as determined by compressing a cylindrical-shaped sample of the cheese composition having a height of 3 cm and a diameter of 3 cm to a height of 1.5 cm at 5° C. In some embodiments, a cheese composition described herein has a firmness of at least 600 grams, as determined by compressing a cylindrical-shaped sample of the cheese composition having a height of 3 cm and a diameter of 3 cm to a height of 1.5 cm at 5° C. In some embodiments, a cheese composition described herein has a firmness of at least 1000 grams, as determined by compressing a cylindrical-shaped sample of the cheese composition having a height of 3 cm and a diameter of 3 cm to a height of 1.5 cm at 5° C. In some embodiments, a cheese composition described herein has a firmness of at least 2000 grams, as determined by compressing a cylindrical-shaped sample of the cheese composition having a height of 3 cm and a diameter of 3 cm to a height of 1.5 cm at 5° C. In some embodiments, a cheese composition described herein has a firmness in the range of about 600 to about 3000 grams, for example about 650 to about 1000 grams, about 1000 grams to about 1500 grams, about 1500 grams to about 2000 grams, about 2500 grams to about 3000 grams, as determined by compressing a cylindrical-shaped sample of the cheese composition having a height of 3 cm and a diameter of 3 cm to a height of 1.5 cm at 5° C.

[0444] As will be understood by those of skill in the art, melting properties can be influenced by a number of factors, including water content, fat content, protein content, and other the presence of other ingredients such as salt, acid, and stabilizers. Meltability may be measured with a rapid visco analyzer (RVA) (Metzger et al., 2002, RVA: Process cheese manufacture, Aust. J Dairy Technol. 57:136; Kapoor et al., 2004, Comparison of pilot scale and rapid visco analyzer process cheese manufacture, J. Dairy Sci. 87:2813-2821; Prow et al., 2005, Melt analysis of process cheese spread or product using a rapid visco analyzer, J. Dairy Sci. 88:1277-1287). Meltability may also be measured by the Schreiber melt test (1977), wherein a 0.5 cm high plug of cheese is placed in a glass petri dish and heated in an oven at 450° F. for 5 minutes. Other melting tests include the Arnott test (1957), the tube test (1958), the melt analysis/UW meltmeter (1997), and the Dynamic Stress Rheometry (DSR) (1998). Shown in Table 17 are some examples of cheeses and their melting temperatures. In some embodiments, the cheese compositions described herein have a melting temperature similar to one or more of the cheeses in Table 17. In some embodiments, the cheese compositions described herein have a melting temperature in the range of 100° F. to 200° F., such as about 120° F., 130° F., 150° F., or 180° F.

TABLE 17
Melting ranges for cheese

| | Melt | |
|---|---|---|
| Cheese type | temperature | Examples |
| Process cheese | 120° F./49° C. | Pasteurized Process Cheese |
| Soft or semi-soft | 130° F./54° C. | Mozzarella |
| cheese | | |
| Hard cheese | 150° F./66° C. | Cheddar, Colby, Edam, Swiss, Gouda |
| Very hard cheese | 180° F./82° C. | Parmesan, Romano, Sardo, Grana |

[0445] In some embodiments, the cheese composition has a melting point of about 35° C. to about 100° C. In some embodiments, the cheese composition has a melting point of about 40° C. to about 50° C. In some embodiments, the cheese composition has a melting point of about 50° C. to about 60° C. In some embodiments, the cheese composition has a melting point of about 60° C. to about 70° C. In some embodiments, the cheese composition has a melting point of about 70° C. to about 90° C.

[0446] As mentioned above, the properties of cheese can be influenced by a number of factors, such as lipids, salts, and/or calcium. Lipids that may be added to the cheese compositions disclosed herein include, for example, dairy fats or vegetable oils such as palm oil or palm kernel oil, butter oil, anhydrous milkfat, soybean oil, corn oil, rapeseed oil, canola oil, sunflower oil, safflower oil, coconut oil, rice bran oil, olive oil, sesame oil, flaxseed oil, hemp oil, cottonseed oil, peanut oil, almond oil, beech nut oil, Brazil nut oil, cashew oil, hazelnut oil, macadamia oil, mongongo nut oil, pecan oil, pine nut oil, pistachio oil, walnut oil, pumpkin seed oil, grapefruit seed oil, lemon oil, apricot oil, apple seed oil, argan oil, avocado oil, or orange oil.

[0447] Examples of salts that may be included in a cheese composition include, but are not limited to, magnesium chloride, sodium chloride, calcium chloride, sodium phosphates and trisodium citrate. In some embodiments, a cheese composition comprises at least one lipid and at least one salt. In some embodiments, a cheese composition comprises calcium. In some embodiments, a cheese composition comprises calcium at a concentration of about 0 to about 2% by weight. In some embodiments, a cheese composition comprises calcium at a concentration of about 0.001 to about 2% by weight. In some embodiments, a cheese composition comprises calcium at a concentration of about 0.01 to about 2% by weight. In some embodiments, a cheese composition comprises calcium at a concentration of about 0.1 to about 2% by weight. In some embodiments, a cheese composition comprises calcium at a concentration of about 1 to about 2% by weight. In some embodiments, a cheese composition has a pH of about 5.2 to about 5.9. In some embodiments, a cheese composition comprises at least one organoleptic property similar to cheese (i.e., cheese produced using mammalian milk, such as bovine milk or goat milk) selected from the group consisting of taste, appearance, mouthfeel, structure, texture, density, elasticity, springiness, coagulation, binding, leavening, aeration, foaming, creaminess, and emulsification. In some embodiments, the cheese composition comprises at least two organoleptic properties similar to cheese (i.e., cheese produced using mammalian milk, such as bovine milk or goat milk) selected from the group consisting of taste, appearance, mouthfeel, structure, texture, density, elasticity, springiness, coagulation, binding, leavening, aeration, foaming, creaminess, and emulsification. In some embodiments, the cheese composition comprises at least three organoleptic properties similar to cheese (i.e., cheese produced using mammalian milk, such as bovine milk or goat milk) selected from the group consisting of taste, appearance, mouthfeel, structure, texture, density, elasticity, springiness, coagulation, binding, leavening, aeration, foaming, creaminess, and emulsification.

[0448] In some embodiments, a cheese composition comprises one or more vitamins, such as retinal, carotene, vitamins, vitamin D, vitamin E, vitamin B12, thiamin, or riboflavin.

### Colloidal Suspensions Comprising One or More Isolated or Recombinant Casein Proteins

[0449] A colloidal suspension is a mixture having particles suspended in a continuous phase with another component. The particles may be, for example, proteins. The other component may be, for example water. Many different kinds of foods may be colloidal suspensions, including beverages and other foods such as jam, ice cream, tofu, mayonnaise, etc. One example of a colloidal suspension is milk.

[0450] The colloidal suspensions described herein may be a Newtonian fluid or a non-Newtonian fluid. Newtonian fluids are characterized by a viscosity that is independent of shear rate; they follow Newton's law of viscosity. Apparent viscosity is the shear stress applied to a fluid divided by the shear rate (expressed in Pascal-second or centipoise units). For a Newtonian fluid, the apparent viscosity is constant. Water is an example of a Newtonian fluid. Non-Newtonian fluids do not follow Newton's law of viscosity; their viscosity can change (for example, become more liquid or more solid) when under force. Ketchup is an example of a non-Newtonian fluid.

[0451] In some embodiments, a colloidal suspension comprises: 1-4 milk proteins (i.e., 1, 2, 3, or 4 recombinant milk proteins). The milk proteins may be recombinant or may be isolated from a mammalian milk. In some embodiments, the milk proteins may be plant-expressed.

[0452] In some embodiments, a colloidal suspension comprises recombinant beta-casein and at least one lipid and does not contain an organoleptically functional amount of beta-lactoglobulin. In some embodiments, the colloidal suspension does not comprise any additional casein proteins. In some embodiments, the colloidal suspension comprises at least one additional casein protein. In some embodiments, the at least one additional casein protein is selected from kappa-casein, para-kappa-casein, beta-casein, alpha-S1-casein and alpha-S2-casein. In some embodiments, the at least one additional casein protein is kappa-casein or para-kappa-casein. In some embodiments, the colloidal suspension is a non-Newtonian fluid.

[0453] In some embodiments, at least 80%, at least 90%, or at least 95% by weight of the total casein protein in a colloidal suspension is beta-casein. In some embodiments, the beta-casein is expressed in a plant. In some embodiments, the beta-casein is expressed in a soybean plant. In some embodiments, all caseins in the composition are plant expressed. In some embodiments, the composition comprises a fusion protein comprising recombinant beta-casein.

[0454] In some embodiments, a colloidal suspension is a non-Newtonian fluid. In some embodiments, a colloidal suspension is characterized as a shear thinning fluid with an apparent viscosity greater than 10 centipoise, at a shear rate of 1 sec⁻¹. In some embodiments, the suspension is an aqueous suspension.

[0455] In some embodiments, the milk proteins comprise between 0.5% (w/v) to 15% (w/v) of the composition, such as about 0.5% (w/v); about 1.0% (w/v), about 1.5% (w/v), about 2.0% (w/v), about 2.5% (w/v), about 3.0% (w/v), about 3.5% (w/v), about 4.0% (w/v), about 4.5% (w/v), about 5.0% (w/v), about 5.5% (w/v), about 6.0% (w/v), about 6.5% (w/v), about 7.0% (w/v), about 7.5% (w/v), about 8.0% (w/v), about 8.5% (w/v), about 9.0% (w/v), about 9.5% (w/v), about 10.1% (w/v), about 10.5% (w/v), about 11.0% (w/v), about 11.5% (w/v), about 12.0% (w/v), about 12.5% (w/v), about 13.0% (w/v), about 13.5% (w/v), about 13.0% (w/v), about 14.5% (w/v), or about 15.0% (w/v). In some embodiments, the colloidal suspension may comprise one or more additional components, such as ash. In some embodiments, the colloidal suspension may comprise one or more vitamins such as retinal, carotene, vitamins, vitamin D, vitamin E, vitamin B12, thiamin, or riboflavin.

[0456] In some embodiments, a colloidal suspension comprises about 8% (w/v) to about 25% (w/v) total protein, such as about 8% to about 10%, about 10% to about 15%, about 15% to about 20%, or about 20 to about 25% total protein. In some embodiments, a colloidal suspension comprises about 1% to about 10% (w/v) total protein. In some embodiments, a colloidal suspension comprises about 25% to about 35%, about 35% to about 45%, about 45% to about 55%, about 55% to about 65%, about 65% to about 75% (w/v), or more total protein.

[0457] In some embodiments, about 1% to about 5% of the total protein in the colloidal suspension is casein protein. In some embodiments, about 5% to about 10% of the total protein in the colloidal suspension is casein protein. In some embodiments, about 10% to about 20% of the total protein in the colloidal suspension is casein protein. In some embodiments, about 20% to about 30% of the total protein in the colloidal suspension is casein protein. In some embodiments, about 30% to about 40% of the total protein in the colloidal suspension is casein protein. In some embodiments, about 40% to about 50% of the total protein in the colloidal suspension is casein protein. In some embodiments, about 50% to about 60% of the total protein in the colloidal suspension is casein protein. In some embodiments, about 60% to about 70% of the total protein in the colloidal suspension is casein protein. In some embodiments, about 70% to about 80% of the total protein in the colloidal suspension is casein protein. In some embodiments, about 80% to about 90% of the total protein in the colloidal suspension is casein protein. In some embodiments, about 90% to about 100% of the total protein in the colloidal suspension is casein protein.

[0458] In some embodiments, at least 1%, at least 2%, at least 3%, at least 4%, at least 5%, at least 6%, at least 7%, at least 8%, at least 9%, at least 10%, at least 110, at least 12%, at least 13%, at least 14%, at least 15%, at least 16%, at least 17%, at least 18%, at least 19%, at least 20%, or more of the total protein in the colloidal suspension is casein protein.

[0459] In some embodiments, about 20% to about 100% of the casein protein in the colloidal suspension is kappa casein. For example, the colloidal suspension may comprise about 20% to about 30%, about 30% to about 40%, about 40% to about 50%, about 50% to about 60%, about 60% to about 70%, about 70% to about 80%, about 80% to about 90%, or about 90% to about 100% kappa casein. In some embodiments, about 20% to about 30%, about 30% to about 40%, about 40% to about 50%, about 50% to about 60%, about 60% to about 70%, about 70% to about 80%, about 80% to about 90%, or about 90% to about 100% of the casein protein in the colloidal suspension is kappa casein.

[0460] In some embodiments, about 20% to about 100% of the casein protein in the colloidal suspension is para-kappa casein. For example, the colloidal suspension may comprise about 20% to about 30%, about 30% to about 40%, about 40% to about 50%, about 50% to about 60%, about 60% to about 70%, about 70% to about 80%, about 80% to about 90%, or about 90% to about 100% para-kappa casein. In some embodiments, about 20% to about 30%, about 30% to about 40%, about 40% to about 50%, about 50% to about 60%, about 60% to about 70%, about 70% to about 80%, about 80% to about 90%, or about 90% to about 100% of the casein protein in the colloidal suspension is para-kappa casein.

[0461] In some embodiments, about 20% to about 100% of the casein protein in the colloidal suspension is beta casein. In some embodiments, about 50% to about 100% of the casein protein in the colloidal suspension is beta casein. For example, the colloidal suspension may comprise about 20% to about 30%, about 30% to about 40%, about 40% to about 50%, about 50% to about 60%, about 60% to about 70%, about 70% to about 80%, about 80% to about 90%, or about 90% to about 100% beta casein. In some embodiments, about 20% to about 30%, about 30% to about 40%, about 40% to about 50%, about 50% to about 60%, about 60% to about 70%, about 70% to about 80%, about 80% to about 90%, or about 90% to about 100% of the casein protein in the colloidal suspension is beta casein.

[0462] In some embodiments, about 20% to about 100% of the casein protein in the colloidal suspension is alpha-S1-casein. In some embodiments, about 50% to about 100% of the casein protein in the colloidal suspension is alpha-S1-casein. For example, the colloidal suspension may comprise about 20% to about 30%, about 30% to about 40%, about 40% to about 50%, about 50% to about 60%, about 60% to about 70%, about 70% to about 80%, about 80% to about 90%, or about 90% to about 100% alpha-S1-casein. In some embodiments, about 20% to about 30%, about 30% to about 40%, about 40% to about 50%, about 50% to about 60%, about 60% to about 70%, about 70% to about 80%, about 80% to about 90%, or about 90% to about 100% of the casein protein in the colloidal suspension is alpha-S1-casein.

[0463] In some embodiments, about 20% to about 100% of the casein protein in the colloidal suspension is alpha-S2-casein. In some embodiments, about 50% to about 100% of the casein protein in the colloidal suspension is alpha-S2-casein. For example, the colloidal suspension may comprise about 20% to about 30%, about 30% to about 40%, about 40% to about 50%, about 50% to about 60%, about 60% to about 70%, about 70% to about 80%, about 80% to about 90%, or about 90% to about 100% alpha-S2-casein. In some embodiments, about 20% to about 30%, about 30% to about 40%, about 40% to about 50%, about 50% to about 60%, about 60% to about 70%, about 70% to about 80%, about 80% to about 90%, or about 90% to about 100% of the casein protein in the colloidal suspension is alpha-S2-casein.

[0464] In some embodiments, colloidal suspension has at least one organoleptic property that is substantially similar to bovine milk. In some embodiments, the organoleptic property is selected from the group consisting of taste, appearance, mouthfeel, structure, texture, density, elasticity, springiness, coagulation, binding, leavening, aeration, foaming, creaminess, and emulsification. In some embodiments, colloidal suspension has at least two, at least three, at least four, at least five, or more organoleptic properties that are substantially similar to bovine milk. In some embodiments, the plant-expressed milk proteins are recombinant, and are selected from beta lactoglobulin, kappa-casein, para-kappa-casein, beta-casein, alpha-S1-casein, and alpha-S2-casein.

[0465] In some embodiments, the colloidal suspensions described herein may be used to produce one or more food compositions such as butter, ice cream, frozen yogurt or custard, yogurt, frozen desserts, cottage cheese, cream cheese, curds, and crème fraiche.

### Methods for Making the Food Compositions Described Herein

[0466] Also provided herein are methods for making solid phase, protein-stabilized emulsions, colloidal suspensions, dairy alternatives and food compositions described herein (collectively referred to in this section as “compositions”). In some embodiments, a method for making a composition comprises isolating one or more casein proteins from a mammalian milk. In some embodiments, a method for making a composition comprises expressing a casein protein in a cell (e.g., in a plant, or microorganism), extracting the recombinant protein, and preparing a composition comprising recombinant casein protein (See, e.g., FIG. 13).

[0467] Initially, all ingredients for the composition are provided. For example, in some embodiments, the one or more milk proteins are provided. The milk proteins may be isolated from a mammalian milk, or may be produced recombinantly (e.g., by expression in a plant). An illustrative process for preparing a recombinant protein for use in making a composition as described herein is illustrated in FIG. 13 and is also described below. In some embodiments, one or more lipids, salts, acids, etc. are also provided. In some embodiments, ash is provided. In some embodiments, one or more vitamins is provided, such as retinal, carotene, vitamins, vitamin D, vitamin E, vitamin B12, thiamin, or riboflavin.

[0468] The ingredients are then combined and mixed. In some embodiments, the mixing is performed at a pre-determined temperature, for example a temperature in the range of about 0° C. to about 10° C., about 10° C. to about 20° C., about 20° C. to about 40° C., about 40° C. to about 50° C., about 50° C. to about 60° C., about 60° C. to about 70° C., about 70° C. to about 80° C., about 80° C. to about 90° C., about 90° C. to about 100° C. or higher. In some embodiments, the mixing is performed at a temperature of about 40° C. In some embodiments, the mixing is performed at a temperature of about 85° C. In some embodiments, the mixing is performed at a temperature of about 90° C. In some embodiments, the mixing is performed at a temperature of about 95° C. In some embodiments, the mixing is performed at a speed that will not negatively affect the properties of the composition, such as a speed of about 100 RPM, 200 RPM, 300 RPM, 400 RPM, 500 RPM, 600 RPM, 700 RPM, 800 RPM, 900 RPM, 1000 RPM, or more. In some embodiments the mixing lasts for about 1 minute, about 2 minutes, about 3 minutes, about 4 minutes, about 5 minutes, about 6 minutes, about 7 minutes, about 8 minutes, about 9 minutes, about 10 minutes, or more.

[0469] In some embodiments, the composition is mixed only once. In some embodiments, the composition is mixed more than once, such as twice, three times, four times, five times, or more. In some embodiments, the temperature is changed between each mix. For example, in some embodiments, the composition is mixed a first time at a first temperature, and a second time at a second temperature. In some embodiments, the composition is mixed a first time at a first temperature, a second time at a second temperature, and a third time at a third temperature. In some embodiments, the composition is mixed a first time at a first temperature, a second time at a second temperature, a third time at a third temperature, and a fourth time at a fourth temperature. In some embodiments, the composition is mixed a first time at 40° C., a second time at 95° C., a third time at 90° C., and a fourth time at 85° C. After mixing and/or between different mixings the composition my be allowed to rest.

[0470] The compositions are then poured into molds. The molds may be of any shape, such as cube-shaped, cylindrical-shaped, triangular prism-shaped, spherical-shaped, cone-shaped, or rectangular prism-shaped. The compositions may then be covered, cooled and stored. In some embodiments, the compositions may be stored for at least 1 day, at least 3 days, at least 5 days, at least 7 days, at least 30 days, at least 180 days, or at least 360 days.

[0471] The pH of the composition may be monitored during production thereof. In some embodiments, the pH may be adjusted to a target pH, such as a pH in the range of about 5.5 to about 5.7. As will be understood by those of ordinary skill in the art, the pH may be adjusted up or down using acids or bases. Exemplary acids that may be used to adjust the pH include lactic acid, citric acid, or sodium citrate.

[0472] An illustrative method for preparing a food composition of the disclosure is provided in FIG. 13. The first step in this method is production of a seed expressing a fusion protein. In this process, an expression construct is designed. The construct is then transformed into a plant. The plant is grown under conditions that allow for expression of the fusion protein. Subsequently, seeds may be collected from the plant for further processing.

[0473] The next step in the method for preparing a food composition illustrated in FIG. 13 is seed processing, to prepare one or more ingredients for use in a food composition. First, the seeds are hulled and ground. Protein (including the fusion protein and other seed proteins) is extracted from the seed. The protein fraction may then be enriched. Specifically, the protein fraction may be enriched for fusion protein. Optionally, the fusion protein may then be concentrated.

[0474] The plant protein, including fusion proteins, may be extracted from a plant using standard methods known in the art. For example, the proteins may be extracted using solvent or aqueous extraction. In some embodiments, the oil may be separated from the proteins using hexane or ethanol extraction to produce a white flake. The proteins may be extracted from the white flake using controlled temperature in an aqueous buffered environment (e.g., carbonate, citrate), in order to control the pH. The fusion proteins can be separated from the plant proteins using selective precipitation of one or more of the proteins with centrifugation or filtration methods. In some embodiments, one or more additives may be used to aid the extraction processes (e.g., salts, protease/peptidase inhibitors, osmolytes, solvents, reducing agents, etc.) The following step is processing the fusion protein into a food product. In some embodiments, constituent proteins of the fusion protein may be separated from one another before they are used to formulate a product. In some embodiments, only one of the constituent proteins of the fusion protein is used in the product. In some embodiments, more than one of the constituent proteins of the fusion protein is used in the product. In some embodiments, all of the constituent proteins of the fusion protein may be used in the product. In some embodiments, the fusion protein may be used itself in the food product. The product is then formulated as desired.

[0475] FIG. 17 also illustrates a method for preparing a food composition. In this method, after seeds are collected, hulled and ground, and protein has been extracted, the fusion protein is separated from other seed protein. In some embodiments, this separation is not 100% efficient, meaning that the “other seed protein” fraction may still contain some residual fusion protein. For example, in some embodiments, the other seed protein fraction may comprise about 0.1%, about 0.3%, about 0.5%, about 0.7%, about 1%, about 2%, about 3%, about 4%, about 5%, about 6%, about 7%, about 8%, about 9%, about 10%, about 20%, about 30%, or about 50% fusion protein by weight. The other seed protein fraction may then be used directly in a food composition. Alternatively, the other seed protein fraction may be combined with concentrated fusion protein. In some embodiments, the other seed protein fraction is combined with one or more of the constituent proteins from the fusion protein. In some embodiments, the other seed protein fraction is combined with all of the constituent proteins from the fusion protein.

[0476] It may be advantageous to use a seed processing composition comprising plant protein and a fusion protein (e.g., about 0.1%, about 0.3%, about 0.5%, about 0.7%, about 1%, about 2%, about 3%, about 4%, about 5%, about 6%, about 7%, about 8%, about 9%, about 10%, about 20%, about 30%, or about 50% fusion protein by weight) as an ingredient in a food composition. Using both (i) a fusion protein produced by a seed and (ii) other protein extracted from the seed allows for efficient use of resources and reduces waste. Such processes may simplify food manufacturing processes, and reduce the unit cost to manufacture each product. Thus, provided herein is a method of making a food composition, the method comprising: (i) expressing a fusion protein in a transformed plant; and (ii) preparing a food composition comprising the fusion protein and plant protein from the same transformed plant in which the fusion protein was produced. In some embodiments, the transformed plant is a soybean. In some embodiments, the transformed plant is pea.

[0477] Without being bound by any theory, it is believed that having a casein protein (i.e., as a monomer or as part of a fusion protein) in a plant protein composition may improve the properties of the plant protein composition. FIG. 19 illustrates various properties that may be improved due to the presence of one or more caseins in a plant protein composition, including. In some embodiments, a plant protein composition comprising one or more casein proteins has improved nutritional properties compared to a plant protein composition that does not contain a casein protein. In some embodiments, a plant protein composition comprising one or more casein proteins has improved organoleptic properties, such as taste, compared to a plant protein composition that does not contain a casein protein. In some embodiments, a plant protein composition comprising one or more casein proteins has improved water holding capacity compared to a plant protein composition that does not contain a casein protein. In some embodiments, a plant protein composition comprising one or more casein proteins has improved emulsification compared to a plant protein composition that does not contain a casein protein. In some embodiments, a plant protein composition comprising one or more casein proteins has improved gelation compared to a plant protein composition that does not contain a casein protein. In some embodiments, a plant protein composition comprising one or more casein proteins has improved viscosity and/or adhesiveness compared to a plant protein composition that does not contain a casein protein. In some embodiments, a plant protein composition comprising one or more casein proteins has improved aeration and/or foaming compared to a plant protein composition that does not contain a casein protein. In some embodiments, a plant protein composition comprising one or more casein proteins has improved solubility compared to a plant protein composition that does not contain a casein protein. Illustrative improvements in each one of these properties are described in further detail below.

[0478] Nutrition: The presence of a casein protein (alone or expressed as a fusion protein) in the plant protein composition may enhance the nutritional properties of the plant protein composition and/or any food compositions comprising the plant protein composition. For example, the presence of the casein protein may, in some embodiments, improve the balance of essential amino acids. Pea protein has a PDCAAS (protein digestibility corrected amino acid score) of about 0.82. Nutritionally complete proteins have a score of about 1.0. By expressing a casein protein (fused to, for example, ovalbumin and/or beta-lactoglobulin) at sufficient levels in a pea plant, the PDCAAS of the protein extracted from the pea plant may reach 1.0, provided that the limiting amino acids (e.g., methionine) are raised. In some embodiments, a plant protein composition comprising a casein protein comprises a PDCAAS of about 0.90, about 0.95, about 1.0, or about 1.05.

[0479] Gelation: In some embodiments, the casein protein present in the plant protein composition may enhance gelation of the plant protein composition and/or any food compositions comprising the plant protein composition. Many of the proteins used as fusion partners in the fusion proteins described herein, including whey proteins (e.g., beta-lactoglobulin) and egg proteins are often added to a number of food products such as meats and bakery products, because the proteins gel after heating and cooling. Seed proteins are generally insoluble under the processing conditions used to prepare many foods, such as meats and bakery products. Methylcellulose is often added to plant-based meats to impart gelling, and egg white has historically been used in some vegetarian products. However, eggs are not considered vegan and do not meet the standard of “plant-based” for many individuals. Thus, by using a plant composition comprising one or more casein proteins (fused to, for example, an egg protein and/or a whey protein), enhanced gelation may be achieved without using animal products.

[0480] Solubility: In some embodiments, the casein protein present in the plant protein composition may enhance solubility of the plant protein composition and/or any food compositions comprising the plant protein composition. Seed proteins typically have poor solubility at acidic and neutral pH. Beverage formulations are suspensions utilizing hydrocolloids such as gellan gum to keep the proteins from settling out. Conversely, casein proteins are soluble at neutral pH, and whey proteins are soluble at acidic pH. Both caseins and whey are soluble at neutral pH. In some embodiments, beverages made with seed protein enhanced by the expression of casein proteins (expressed alone or fused to, for example, a whey protein) exhibit a smoother and/or less chalky mouthfeel.

[0481] Emulsification: In some embodiments, the casein protein present in the plant protein composition may enhance emulsification of the plant protein composition and/or any food compositions comprising the plant protein composition. Caseinates are effective at emulsifying lipids with a low viscosity, and this property is used in spray drying to produce powdered coffee creamers and powdered sauces with lipids used in convenience foods. Seed proteins do not have these attributes, and additives such as starches chemically modified with octenyl succinic anhydride are often used as additives in plant protein compositions. Food compositions made with plant protein compositions comprising casein proteins will have improved emulsification properties for a number of different applications.

[0482] Water holding capacity: In some embodiments, the casein protein may enhance the water holding capacity of the plant protein. During the processing of the plant protein, pH and heat conditions can be modified to denature the casein protein to enhance this property.

[0483] Aeration/Foaming: Aeration and foaming properties of the plant protein can be improved by the addition of the casein proteins. Caseins have excellent foaming properties, as evidenced by their incorporation in frozen whipped toppings. Egg proteins and beta-lactoglobulin also demonstrate good foaming properties. The surface-active properties of these proteins are beneficial in food compositions.

[0484] Viscosity/Adhesiveness: Unstructured casein proteins can unfold to interact with other components of a food composition to impart viscosity and adhesiveness. Granola bars can utilize casein proteins at specific concentrations to form a viscous solution that holds the particulates together.

[0485] Flavor: The casein proteins can also improve the flavor of plant proteins. In addition to acting as binders for off flavors, casein proteins can impart desirable flavors to food compositions. Hydrolyzed protein caseins impart a savory umami flavor similar to those from autolyzed yeast extract. Some of the expressed caseins are hydrolyzed by plant enzymes in the seed, and the resultant peptides can provide savory flavors.

[0486] In some embodiments, a plant protein composition comprising a fusion protein is used to produce a food composition. The food composition may be, for example, a meat analog, a nutritional bar, a bakery product, a beverage, mashed potatoes, or candy. In some embodiments, the food composition is for a human. For example, the food composition may be infant formula. In some embodiments, the food composition is for a companion animal (e.g., a dog, cat, rabbit, hamster, guinea pig, horse, etc.) For example, the food composition may be pet food.

[0487] Also provided herein are various compositions prepared during a method of making a food composition. For example, in some embodiments, a seed processing composition is provided. In some embodiments, a seed processing composition comprises (a) a fusion protein comprising i) a full-length κ-casein or para-κ-casein component; and ii) a β-lactoglobulin component; and (b) plant seed tissue. In some embodiments, a seed processing composition comprises (a) a fusion protein comprising i) a beta-casein component; and ii) a β-lactoglobulin component; and (b) plant seed tissue. In some embodiments, a seed processing composition comprises (a) a fusion protein comprising i) a milk protein (e.g., a casein protein); and ii) a second protein (i.e., a fusion partner); and (b) plant seed tissue. In some embodiments, the plant seed tissue is ground. In some embodiments, the plant seed tissue is from soybean. In some embodiments, the seed processing composition comprises at least one member selected from the group consisting of: enzyme (e.g., chymosin), protease, extractant, solvent (e.g., ethanol, or hexane), buffer, additive, salt, protease inhibitor, peptidase inhibitor, osmolyte, and reducing agent.

[0488] In some embodiments, a protein concentrate composition is provided. In some embodiments, the protein concentrate composition comprises: a fusion protein, comprising i) a full-length κ-casein or para-κ-casein component; and ii) a β-lactoglobulin component. In some embodiments, the protein concentrate composition comprises: a fusion protein, comprising i) a beta-casein component; and ii) a β-lactoglobulin component. In some embodiments, the protein concentrate composition comprises: a fusion protein, comprising i) a milk protein (e.g., a casein protein); and ii) a second protein (i.e., a fusion partner). In some embodiments, the fusion protein is present in an enriched amount, relative to other components present in the composition. In some embodiments, there is substantially no plant seed tissue present in the protein concentrate composition. In some embodiments, the protein concentrate composition further comprises at least one member selected from the group consisting of: enzyme (e.g., chymosin), protease, extractant, solvent (e.g., ethanol, or hexane), buffer, additive, salt, protease inhibitor, peptidase inhibitor, osmolyte, and reducing agent.

[0489] In some embodiments, a food composition comprises a fusion protein comprising a first protein and a second protein. In some embodiments, a food composition comprises a first protein, wherein the first protein is derived from (i.e., separated from) a fusion protein comprising at least the first protein and a second protein. In some embodiments, a food composition comprises (i) a fusion protein comprising a first protein and a second protein and (ii) at least one of the first protein and the second protein, wherein the first protein and/or the second protein has been separated from the fusion protein. The first protein and/or second protein which have been separated from the fusion protein may comprise, in some embodiments, at least at least one non-native amino acid from an introduced protease cleavage site (e.g., a chymosin cleavage site).

[0490] In some embodiments, the food composition is a solid. In some embodiments, the food composition is a liquid. In some embodiments, the food composition is a powder.

[0491] In some embodiments, the food composition is a solid phase, protein-stabilized emulsion. In some embodiments, the food composition is a colloidal suspension.

[0492] In some embodiments, the fusion proteins and transgenic plants described herein may be used to prepare a food composition such as cheese or processed cheese products. In some embodiments, the food composition is an alternative dairy composition selected such as milk, cream, or butter. The alternative milk composition may be used to prepare alternative dairy compositions such as yogurt and fermented dairy products, directly acidified counterparts of fermented dairy products, cottage cheese, dressing, curds, crème fraiche, toppings, tofu, icings, fillings, low-fat spreads, dairy-based dry mixes, frozen dairy products, frozen desserts, desserts, baked goods, soups, sauces, salad dressing, geriatric nutrition, creams and creamers, analog dairy products, follow-up formula, baby formula, infant formula, milk, dairy beverages, acid dairy drinks, smoothies, milk tea, butter, margarine, butter alternatives, growing up milks, low-lactose products and beverages, medical and clinical nutrition products, protein/nutrition bar applications, sports beverages, confections, meat products, analog meat products, meal replacement beverages, and weight management food and beverages.

[0493] In some embodiments the fusion proteins and transgenic plants described herein may be used to prepare a dairy product. In some embodiments, the dairy product is a fermented dairy product. An illustrative list of fermented dairy products includes cultured buttermilk, sour cream, yogurt, skyr, leben, lassi, or kefir. In some embodiments the fusion proteins and transgenic plants described herein may be used to prepare cheese products.

[0494] In some embodiments the fusion proteins and transgenic plants described herein may be used to prepare a powder containing a milk protein. In some embodiments, the fusion proteins and transgenic plants described herein may be used to prepare a low-lactose product.

[0495] In some embodiments, a method for making a food composition comprises, expressing a recombinant fusion protein of the disclosure in a plant, extracting the recombinant fusion protein from the plant, optionally separating the milk protein from the mammalian or plant protein, and creating a food composition using the fusion protein and/or the milk protein.

[0496] In some embodiments, a method of expressing, extracting, and making a food composition from a fusion protein, comprises: expressing a fusion protein in a host cell, the fusion protein comprising a first protein and a second protein; extracting the fusion protein from the host cell; and processing the fusion protein into a food composition. The food composition may be, for example, cheese, processed cheese product, yogurt, fermented dairy product, directly acidified counterpart of fermented dairy product, cottage cheese dressing, frozen dairy product, frozen dessert, dessert, baked good, topping, icing, filling, low-fat spread, dairy-based dry mix, soup, sauce, salad dressing, geriatric nutrition, cream, creamer, analog dairy product, follow-up formula, baby formula, infant formula, milk, tofu, dairy beverage, acid dairy drink, smoothie, milk tea, butter, margarine, butter alternative, growing up milk, low-lactose product, low-lactose beverage, medical and clinical nutrition product, protein bar, nutrition bar, sport beverage, confection, meat product, analog meat product, meal replacement beverage, weight management food and beverage, dairy product, cultured buttermilk, sour cream, yogurt, skyr, leben, lassi, kefir, powder containing a milk protein, and low-lactose product. In some embodiments, the food composition is a dairy product. In some embodiments, the food composition is a cheese.

[0497] In some embodiments, a method for making a food composition comprises, expressing a recombinant fusion protein of the disclosure in a plant, extracting one or both of the proteins, and creating a food composition using the milk protein. In some embodiments, the first protein and the second protein are separated from one another in the plant cell, prior to extraction. In some embodiments, the first protein is separated from the second protein after extraction, for example by contacting the fusion protein with an enzyme that cleaves the fusion protein. The enzyme may be, for example, chymosin. In some embodiments, the fusion protein is cleaved using rennet.

Composition of food compositions described herein

[0498] Provided is a composition that comprises at least a recombinant mammalian milk protein and a second protein selected from the group consisting of 7S globulin glycinin, 11S globulin, Lipoxygenase, and a Kunitz Trypsin Inhibitor. In some embodiments, the second protein is the 7S globulin glycinin. In some embodiments, the second protein is the 11S globulin. In some embodiments, the second protein is the Kunitz Trypsin Inhibitor. In some embodiments, the composition further comprises chlorophyll.

[0499] Any of the described milk proteins can be utilized in the aforementioned composition. In some embodiments, the milk protein is selected from the group consisting of α-S1 casein, α-S2 casein, β-casein, κ-casein, para-κ-casein, and β-lactoglobulin. In some embodiments, the milk protein is selected from the group consisting of: α-S1 casein, α-S2 casein, β-casein, κ-casein, para-κ-casein, β-lactoglobulin, α-lactalbumin, lysozyme, lactoferrin, lactoperoxidase, serum albumin, and an immunoglobulin. In some embodiments, the composition has reduced or no lactose. In some embodiments, the composition lacks lactose. In some embodiments, the composition does not have one or more proteins present in cow milk or another mammalian milk (e.g., goat, sheep, human, and combinations thereof). In some embodiments, the one or more proteins present in cow milk are selected from the group consisting of α-S1 casein, α-S2 casein, β-casein, κ-casein, para-κ-casein, β-lactoglobulin, α-lactalbumin, lysozyme, lactoferrin, lactoperoxidase, serum albumin, and an immunoglobulin. In some embodiments, the one or more proteins present in cow milk are selected from the group consisting of α-lactalbumin, lysozyme, lactoferrin, lactoperoxidase, serum albumin, and an immunoglobulin.

[0500] In some embodiments, a recombinant milk protein is expressed in a fusion protein with a fusion partner. Potential fusion partners are described herein. In some embodiments, the fusion partner comprises a milk protein. In some embodiments, a fusion partner is selected from the group consisting of α-S1 casein, α-S2 casein, β-casein, κ-casein, para-κ-casein, and β-lactoglobulin. In some embodiments, a fusion partner is selected from the group consisting of: α-S1 casein, α-S2 casein, β-casein, κ-casein, para-κ-casein, β-lactoglobulin, α-lactalbumin, lysozyme, lactoferrin, lactoperoxidase, serum albumin, and an immunoglobulin

[0501] In some embodiments, a fusion protein comprises a configuration comprising: Beta-casein-AlphaS1-casein-AlphaS1-casein-Beta-casein; Beta-casein-Beta-casein-Kappa-casein-Beta-lactoglobulin; Beta-casein-Beta-casein-Beta-casein-Beta-casein; and Gamma-Zein-Beta-casein.

[0502] In some embodiments, a composition comprises a nucleic acid encoding glycinin. In some embodiments, a composition comprises a nucleic acid encoding lipoxygenase. In some embodiments, a composition comprises a nucleic acid encoding kunitz trypsin inhibitor. In some embodiments, a recombinant mammalian milk protein comprises reduced phosphorylation as compared to a corresponding mammalian milk protein in a bovine as determined by mass spectrometry after trypsin or chymotrypsin digestion.

[0503] In some embodiments, the milk protein and second protein are present at a w/w ratio of at least about 1:100, 1:90, 1:80, 1:70, 1:60, 1:50, 1:40, 1:30, 1:20, 1:19, 1:18, 1:17, 1:16, 1:15, 1:14, 1:13, 1:12, 1:11, 1:10, 1:9, 1:8, 1:7, 1:6, 1:5, 1:4, 1:3, 1:2, or 1:1. In some embodiments, the milk protein and second protein are present at a w/w ratio of at least about: 1: 50-1:100, 1:20-1:50, 1:1-1:10, 1:1-1:20, 1:10-1:30, 1:20-1:50, 1:15-1:30, 1:20-1:30, 1:30-1:40, or 1:16-1:20.

[0504] In some embodiments, traditional plant products with no milk proteins, or with low ratios of milk protein to secondary protein, were not suitable for their intended purpose. For example, lack of milk proteins resulted in food compositions that lacked stability in aqueous solutions, separated out, and also lacked nutritional qualities associated with milk products.

[0505] In contrast, the compositions of the present disclosure, which selected rations of first protein to second protein exhibit improved qualities. Example 28 tests a few of these improved compositions and demonstrates their improved physical and organoleptic properties.

[0506] In some embodiments, the composition is a plant-based milk, ice cream, tofu, cheese, spread, and the like. In some embodiments, the composition requires little to no processing. For example, in some embodiments the compositions exhibiting the indicated ratios are edible seeds, legumes, or other plant parts (e.g., crushed up seed paste). In some embodiments, the compositions exhibiting the indicated ratios are soluble portions of disrupted tissue, such as soy milk.

### Plant Seed Proteins

[0507] Many plant storage tissues, such as seeds, leaves, roots, and tubers, accumulate reserves of proteins during development. Certain types of seeds, such as soybean, are capable of accumulating a relatively high level of endogenous protein, about 35% to 55% protein of the dry weight, depending on varieties. The abundance of proteins in soybean seeds has made them the primary dietary protein source and has stimulated an interest in developing approaches to genetically engineer seeds to improve their nutritional quality or produce heterologous proteins of interest, such as animal proteins, for the manufacture of transgenic products.

[0508] One example of the plant seeds to which a platform of the present disclosure is applied is a soybean plant. Among the proteins accumulated in soybean seeds, the majority is storage protein. There are two soybean seed storage proteins: glycinin (11S globulin) and beta-conglycinin (7S globulin). Together, they comprise about 70% to 80% of the total seed protein, and 25% to 35% of the dry weight of the seed. Both of these proteins are made up of multiple isoforms derived from gene families.

[0509] Glycinin (11S globulin) and β-conglycinin (7S globulin) are the most important soybean proteins. The 2S fraction is found in a lesser amount and consists of Bowman-Birk and Kunitz trypsin inhibitors, cytochrome c, and α-conglycinin.

[0510] Glycinin is a major soybean seed storage protein with a molecular weight of about 360 kDa. It is a hexamer composed of the various combinations of five major subunits identified as G1, G2, G3, G4 and G5. As other legumin-like globulins, glycinin consists of one basic and one acidic polypeptide, which are linked by a single disulfide bond, except for the acidic polypeptide A4. The molecular masses of the basic polypeptides are around 20 kDa, while those of the acidic polypeptides are around 38 kDa. At ambient temperatures and pH 7.6 (I=0.5 M), glycinin forms hexamers (11S) with molecular masses around 300-360 kDa.

[0511] Beta-conglycinin is a heterogeneous glycoprotein with a molecular weight ranging from 150 and 240 kDa. It is composed of varying combinations of three highly negatively charged subunits identified as α, α′ and β. In wild-type seeds, β-conglycinin comprises about 15-20% of the total soybean protein. β-Conglycinin is a trimeric glycoprotein (7S) consisting of three types of subunits, α′ (57-72 kDa), α (57-68 kDa) and β (45-52 kDa) in different combinations. As for other 7S globulins, the subunits are associated via hydrophobic and hydrogen bonded interactions without the contribution of disulfide bonds. At pH 5 and higher, β-conglycinin is found as a trimer (I=0.5 M), whereas it predominantly exists as a hexamer at ionic strength lower than 0.1 M. At pH values 2-5, β-conglycinin reversibly dissociates into a 2-3S and 5-6S fraction at ionic strength lower than 0.1 M.

[0512] The seeds of many plant species contain storage proteins. These proteins have been classified on the basis of their size and solubility (Higgins, T. J. (1984) Ann. Rev. Plant Physiol. 35:191-221). While not every class is found in every species, the seeds of most plant species contain proteins from more than one class. Proteins within a particular solubility or size class are generally more structurally related to members of the same class in other species than to members of a different class within the same species. In many species, the seed proteins of a given class are often encoded by multigene families, sometimes of such complexity that the families can be divided into subclasses based on sequence homology.

[0513] Plant storage proteins, especially those processed through the secretory pathway, generally undergo multiple post-translational processing steps including folding, assembly, intracellular sorting, and proteolytic processing, prior to final deposition (Muntz et al. (1993) Proc. Phytochem. Soc. Eur. 35: 128-146; Muntz (1998) Plant Mol. Biol. 38: 77-99; Herman and Larkins (1999) Plant Cell 11: 601-613). Accumulation and deposition of the proteins is accomplished by compartmentalization in specialized vacuoles termed protein storage vacuoles and or protein bodies (Hara-Nishimura et al. (1995) J. Plant Physiol. 145: 632-640; Mintz (1998) Plant Molec. Biol. 38: 77-99; Herman and Larkins (1999) Plant Cell 11: 601-613).

[0514] The proteolytic processing steps of protein deposition in vacuoles include specific polypeptide cleavage steps accomplished by proteases localized to the storage vacuole (Bassham et al. (2000) Curr. Opin. Cell Biol. 12: 491-495). Storage proteins that accumulate in vacuoles have therefore co-evolved with the environment of the storage vacuole, such that only a select few protease sites exist or are accessible to these proteases (Hara-Nishimura et al. (1987) Plant Physiol. 85: 440-445; D'Hondt et al., (1993) J. Biol. Chem. 268: 10884-10891; Hara-Nishimura et al. (1993) Plant Cell 5: 1651-1659; Hara-Nishimura et al. (1995) J. Plant Physiol. 145: 632-640).

[0515] In some embodiments, seed proteome rebalancing is employed to increase expression of a desired protein product by genomically disrupting an endogenous gene that encodes a storage protein. In some embodiments, storage proteins in target plants can be identified by functional, structural, and/or sequence homologies and can be utilized for seed proteome rebalancing.

[0516] In some embodiments, the plant seed is a soybean seed. Non-limiting examples of plants for use of their seeds in the present disclosure include Vicia genus, Phaseolus genus, Vigna genus, Cicer genus, Pisum genus, Lathyrus genus, Lens genus, lablab genus, Glycine genus, Psophocarpus genus, Cajanus genus, Mucuna genus, Cyamopsis genus, Canavalia genus Macrotyloma genus Lupinus genus and Archis genus. Vicia genus includes Vicia faba (broad beans, known in the US as fava beans). Phaseolus genus includes Phaseolus acutifolius (tepary bean), Phaseolus coccineus (runner bean), Phaseolus lunatus (lima bean), Phaseolus vulgaris (common bean; includes the pinto bean, kidney bean, black bean, Appaloosa bean as well as green beans, and many others), and Phaseolus polyanthus (a.k.a. P. dumosus). Vigna genus includes Vigna aconitifolia (moth bean), Vigna angularis (adzuki bean), Vigna mungo (urad bean), Vigna radiata (mung bean), Vigna subterranea (Bambara bean or ground-bean), Vigna umbellata (ricebean), and Vigna unguiculata (cowpea; also includes the black-eyed pea, yardlong bean and others). Cicer genus includes Cicer arietinum (chickpea or garbanzo bean). Pisum genus includes Pisum sativum (pea). Lathyrus genus includes Lathyrus sativus (Indian pea), and Lathyrus tuberosus (tuberous pea). Lens genus includes Lens culinaris (lentil). Lablab genus includes Lablab purpureus (hyacinth bean). Glycine genus include Glycine max (soybean). Psophocarpus genus includes Psophocarpus tetragonolobus (winged bean) and Psophocarpus tetragonolobus (winged bean). Cajanus genus includes Cajanus cajan (pigeon pea). Mucuna genus includes Mucuna pruriens (velvet bean). Cyamopsis genus includes Cyamopsis tetragonoloba (guar). Canavalia genus includes Canavalia ensiformis (jack bean) and Canavalia gladiata (sword bean). Macrotyloma genus includes Macrotyloma uniflorum (horse gram). Lupinus (lupin) genus includes Lupinus mutabilis (tarwi) and Lupinus albus (lupini bean). Arachis genus includes Arachis hypogaea (peanut).

[0517] In some embodiments, non-limiting examples of plants for use of their seeds in the present disclosure include Avena genus, Zea genus, and Oryza genus. Avena genus includes cultivated oats such as Avena sativa, Avena abyssinica, Avena byzantina, Avena nuda, and Avena strigosa. Zea genus includes Zea mays. Oryza genus includes a food crop rice such as Oryza sativa and Oryza glaberrima.

### Amino Acid Rebalancing (Seed Proteome Rebalancing)

[0518] Seeds have evolved to store triglycerides, non-structural reserve carbohydrates and protein at maximum density within storage cells, leaving little cellular space to add additional products resulting from transgene expression. Within its developmental program, the seed exhibits a limited degree of storage substance plasticity, and rebalances storage protein content via nutrient availability, such as sulphur (Beach et al., 1985 Nucleic Acids Res. 13, 999-1013; Hirai et al., 1995 Plant Cell Physiol. 36, 1331-1339; Hagan et al., 2003 Plant J. 34, 1-11; Tabe et al., 2002 Curr. Opin. Plant Biol. 5, 212-217).

[0519] In some embodiments, one strategy to enhance foreign protein production involves exchanging the capacity to produce intrinsic proteins for the capacity to produce a high level of foreign proteins. In some embodiments, the collateral proteome rebalancing that occurs with the suppression of endogenous proteins in soybean can be exploited to produce an enhanced level of foreign proteins.

[0520] The present disclosure teaches use of the protein synthesis capacity of a high-protein seed by redirecting a significant part of the protein synthesis capacity from the production of intrinsic seed proteins to the synthesis of foreign protein(s). Large-scale alteration of the proteome can be produced by the introduction of gene-editing systems that suppress and/or knock out one or more of the seed proteins.

[0521] For beans such as soybeans, like many other seeds (Her-man and Larkins, 1999 Plant Cell, 11, 601-661), the two major storage proteins, glycinin (11S legumin type) and conglycinin (7S vicilin type), dominate the proteome. The soybean seed proteome also includes many moderately abundant proteins that are bioactive and allergenic, such as the Kunitz and Bowman-Birk trypsin inhibitors, lectin, P34 allergen, sucrose binding protein, urease, oleosins (Herman and Burks, 2011 Curr. Opin. Biotechnol. 22, 224-230) and several thousand low abundance proteins, including enzymes that mediate metabolism, synthesize storage substances, and create the structural framework of the cell. The specific mix of proteins and each protein's abundance within the proteome determines the total amino acid composition trait.

[0522] In some embodiments, suppression of one seed protein can lead to a compensation by an increase in the production of other seed proteins, termed “compensation” or “rebalancing.” In some embodiments, this seed proteome rebalancing is presented in the present disclosure with plant lines having a deficiency in seed proteins including, but not limited to β-conglycinin α, β-conglycinin α′, β-conglycinin β, Cysteine Protease, Glycinin 1, Glycinin 2, Glycinin 3, Glycinin 4, Glycinin 5, Glycinin 7, Kunitz-type Trypsin inhibitor, and lectin by gene-editing techniques described herein. In some embodiments, seed proteome rebalancing is presented in the present disclosure with plant lines having a deficiency in proteins for example, listed in Tables 3-1, 3-2, and 4, in plants of interest by gene-editing techniques described herein. In some embodiments, a plant (or specific plant part, such as a bean) has reduced expression of a protein selected from the group consisting of: β-conglycinin α, β-conglycinin α′, β-conglycinin β, Cysteine Protease, Glycinin 1, Glycinin 2, Glycinin 3, Glycinin 4, Glycinin 5, Glycinin 7, Kunitz-type Trypsin inhibitor, and lectin. In some embodiments, a CRISPR system is employed to effectuate a genomic disruption of at least a portion of a gene thereby reducing or eliminating expression of a protein encoded by the portion of the gene.

[0523] For the seed proteome rebalancing, a target protein for genetic deficiency is determined by an amino acid rebalancing method described herein.

[0524] Provided is an amino acid rebalancing platform (also interchangeably used as an amino acid bottleneck identification). An amino acid rebalancing platform can be used to identify which of most abundant proteins in seeds have an amino acid profile that best matches the profile of a target protein or recombinant protein of interest in a view of compensating each other when the amino acid rebalancing is demanded. In some embodiments, one or more endogenous proteins in plant seeds are selected to be reduced or knocked out (or optionally knocked down) in order to trigger the amino acid rebalancing in a plant seed and make enough metabolites available for the synthesis of the proteins of interest described herein. In some embodiments, seeds are malleable structures which are able to redirect metabolic resources from certain protein types to others and present the ability to maintain an overall final amino acid content.

[0525] In some embodiments, targets for gene editing are selected from their predicted demand on the seed proteome, in relationship to the demands on the seed imposed by recombinant proteins. For example, the ratio of Proline to other amino acids can be determined to have higher in kappa-casein than in soybean seeds reported in Kovalenko et al 2006, when compared amino acid compositions as described herein. From the most prominent seed storage proteins based on RNAseq (Gunadi et al. 2016), the highest percentage AA utilization of Proline is in the proteins coded by Glyma.13G123500, and Glyma.10G037100, at 7.16% Proline and 6.75% Proline, respectively as shown in Table 69. Without these two genes, demands on the seed's free amino acid pool more Proline are available for the recombinant protein and accumulation of the recombinant protein increases.

[0526] In some embodiments, a method comprises: (a) determining amino acid demands for a recombinant protein; (b) calculating the difference (A) between the most required amino acids and the provided balance in soybean; and (c) selecting a soy protein that that will release most of the amino acids identified in steps (a) and (b).

[0527] In some embodiments, the genetic deficiency results in an amount of a specific seed-associated protein (e.g. seed storage protein) that is less than about 1%, about 2%, about 5%, about 10%, about 25%, about 50%, about 75%, or about 85% of the amount of the endogenous seed storage protein that is normally present in a WT soybean seed. In other embodiments, one or more the seed-associated proteins listed in Tables 69-71 are suppressed, repressed, reduced, and/or eliminated by a CRISPR-Cas system.

[0528] In other embodiments, the target sequence for genetic deficiency is a nucleic acid sequence encoding a seed protein. In further embodiments, the seed protein is chosen based on its predicted free amino acid demand on the seed proteome when compared to that of the recombinant protein of interest as described in Example 1.

[0529] In some embodiments, provided herein is an amino acid rebalancing based method for enhanced expression of a protein of interest in a plant seed, comprising: a) calculating a % amino acid composition of the protein of interest; b) calculating the endogenous amino acid balance provided by the plant seed; c) identifying an amino acid rebalancing target profile, by calculating the % difference (A %) between the amino acids required to produce the protein of interest and the endogenous amino acid balance provided by the plant seed; d) ranking each amino acid from the amino acid rebalancing target profile by A %; e) identifying an endogenous seed storage protein comprising an amino acid that ranks in the top 5 Δ % from the amino acid rebalancing target profile ranked in (d); f) disrupting expression of an endogenous target gene encoding the seed storage protein identified in (e); and g) expressing the protein of interest in the plant cell.

[0530] In other embodiments, provided herein is an amino acid rebalancing based method for enhanced expression of a protein of interest in a plant seed, comprising: a) calculating a % amino acid composition of the protein of interest; b) calculating the endogenous amino acid balance of each highly expressed protein based on % expression level of seed proteins in the seed; c) identifying an amino acid rebalancing target profile, by calculating the % difference (Δ %) between the amino acid composition of step (a) and the endogenous amino acid balance of step (b); d) identifying endogenous seed storage proteins with a positive value on the amino acid rebalancing target profile of step (c); e) disrupting expression of at least one endogenous target gene encoding the seed storage protein identified in step (d); and f) expressing the protein of interest in the plant cell, when the protein is considered to be expressed at least 0.5%, at least 1%, at least 2%, at least 3%, at least 4%, at least 5%, at least 6%, at least 7%, at least 8%, at least 9%, or at least 10% in the seed.

### Enhancing Production of Proteins of Interest in Seeds Using Amino Acid Rebalancing

[0531] The present disclosure teaches that suppression of the seed protein listed in Tables 3-1, 3-2 and 4 by sequence mediated gene silencing is compensated for by an increased abundance of heterologous proteins of interest encoded by nucleic acid sequences listed in Table 9.

[0532] In some embodiments, seed storage protein suppression is achieved using CRISPPR/Cas technology as described above and in Examples 1 and 2. This method results in the complete silencing of target seed storage protein. A fraction of the increased production of heterologous proteins of interest can be retained in the form of its precursor and be sequestered in Protein Bodies (PBs) directly assembled within the endoplasmic reticulum (ER) or Protein Storage vacuoles (VSRs). Accumulation of proteins in a protein body, instead of the PSV, demonstrates two important points: 1) that ER-derived PBs can be induced and accumulate proteins in soybean seeds and, 2) that suppression of an endogenous storage protein results in the increased accumulation of another storage protein to compensate for mass loss. This phenomenon maintains the overall protein content of the soybean seed to 40%, and is termed ‘rebalancing’.

[0533] In some embodiments, plant lines having a deficiency of both Glycinin 4 and Glycinin 5 are prepared, as described in Example 1. In these seeds that are genetically deficient in both Glycinin 4 and Glycinin 5, the protein loss is compensated by the production of other foreign proteins of interest. The changes in protein production can be seen by protein detection methods described in Example 1 when compared seed protein extracts of WT to that of the transgenic seeds. The removal of the seed proteins Glycinin 4 and Glycinin 5 in the transgenic line can result in compensation by other foreign kappa-casein proteins by amino acid rebalancing due to the highest demand for Proline, which was calculated and designed for enhanced expression of the protein of interest that can compensate for the lack of protein the most.

[0534] In other embodiments, the present disclosure teaches that a deficiency and/or suppression of one or more seed storage proteins disclosed in Table 3 such as β-conglycinin α, β-conglycinin α′, β-conglycinin J, Cysteine Protease, Glycinin 1, Glycinin 2, Glycinin 3, Glycinin 4, Glycinin 5, Glycinin 7, Kunitz-type Trypsin inhibitor, and Lectin can be introduced using an amino acid rebalancing platform, as described in Example 1. In these seeds that are genetically deficient in one or more seed storage proteins disclosed in Table 3, the protein loss triggers collateral changes of the seed proteome that provides opportunity of increased production of other foreign proteins of interest, which compensate for the loss of amino acids. The changes in protein production can be seen by protein detection methods described in Example 24.

[0535] The removal of the seed proteins such as β-conglycinin α, β-conglycinin α′, β-conglycinin β, Glycinin 1, Glycinin 4, and Kunitz-Trypsin inhibitor as described in Example 1 can be compensated by expression of other foreign proteins such as κ-Casein, Ovalbumin, Vitellogenin-2 and a chicken fibroblast growth factor.

[0536] Provided herein are seeds that possess an intrinsic biology that may be exploited as the foundation of a protein production platform by having a foreign protein share in the rebalancing process and by accumulating the foreign protein in a stable population of PBs. Together this is the basis of developing dicot seeds as a protein production platform. In some embodiments, one (or more) seed storage proteins is reduced as discussed above, and a desired heterologous protein is produced in the seed. In some embodiments, any suitable promoter is operably linked to the sequence encoding the heterologous protein. In another embodiment, the sequence encoding the heterologous protein is operatively linked to a seed-specific promoter taught in the present disclosure. The promoter can be, for example, a tissue specific promoter described herein.

[0537] In some embodiments, increased expression of the heterologous protein can occur when its gene sequence is operably linked to a promoter of the gene that encodes a protein that is upregulated in response to the above-described genetic deficiency in a soybean seed. For each specific protein that is removed from a seed, another protein (or proteins) may be produced in its place. By using the gene regulatory region (such as the promoter, terminator, and optionally other regions) of this “compensating” protein to drive the expression of the heterologous gene of interest, one can obtain an even higher level of protein production in the seed. Accordingly, in some embodiments, the seed protein that is suppressed is one or more proteins listed in Tables 3-1, 3-2 and 4, while the expression of the heterologous protein is controlled by at least a portion of the regulatory region of genes listed in Table 9. In some embodiments, this regulatory region is located upstream of the heterologous sequence encoding protein of interest. In some embodiments, the regulatory region is downstream or 3′ end of the heterologous sequence. In some embodiments, the regulatory region comprises the promoters listed in Table 9. In some embodiments, the regulatory region is the upstream regulatory region, which can include, for example, the promoter and/or the 5′ UTR. In other embodiments, the regulatory region also includes the 3′ regulatory region. In some embodiments, the upstream regulatory region includes a signal peptide sequence of genes listed in Table 9.

[0538] In some embodiments, the seed protein that is suppressed is Glycinin 4 and Glycinin 5, while the heterologous protein such as protein of interest is controlled by at least a portion of the regulatory regions (5′, 3′, and/or signal peptide sequence) from genes listed in Table 1.

[0539] In some embodiments, the seed protein that is suppressed is β-conglycinin α, β-conglycinin α′, β-conglycinin β, Glycinin 1, Glycinin 4, and Kunitz-Trypsin inhibitor, while the heterologous protein such as protein of interest is controlled by at least a portion of the regulatory regions (5′, 3′, and/or signal peptide sequence) from genes listed in Table 9.

[0540] In one example, by placing the heterologous expression cassette under a seed-specific promoter such as regulatory region of one of Glycinin genes, the expression of the heterologous transcript will mimic that of glycinin gene expression and regulation and thereby likely participate in nutrient allocation that involves upregulation of glycinin genes. Also, expression of the heterologous protein of interest will be further enhanced by placing another gene-editing cassette aimed for knocking out the endogenous genes coding for seed storage proteins, for example, β-conglycinin α, β-conglycinin α′, β-conglycinin β, Glycinin 1, Glycinin 4, Glycinin 5, and Kunitz-Trypsin inhibitor. Soybeans expressing one or more transgenes and suppressing endogenous seed protein show increased accumulation of the heterologous foreign protein in the seed. Thus, the enhancement of foreign protein accumulation in the seeds demonstrates that mimicking the allele of the gene participating in protein rebalancing can result in a large increase in accumulation of the heterologous protein of interest such as x-Casein, Ovalbumin, Vitellogenin-2 and a chicken fibroblast growth factor as examples.

[0541] In another example, by placing the heterologous protein expression cassette under a seed-specific promoter such as regulatory region of one of β-conglycinin genes, the expression of the heterologous transcript will mimic that of β-conglycinin gene expression and regulation and thereby likely participate in nutrient allocation that involves upregulation of β-conglycinin genes. Also, expression of the heterologous protein of interest will be further enhanced by placing another gene-editing cassette aimed for knocking out the endogenous genes coding for seed storage proteins, for example, β-conglycinin α, β-conglycinin α′, β-conglycinin J, Glycinin 1, Glycinin 4, and Kunitz-Trypsin inhibitor. Soybeans expressing one or more transgenes and suppressing endogenous seed protein show increased accumulation of the heterologous foreign protein in the seed. Thus, the enhancement of foreign protein accumulation in the seeds demonstrates that mimicking the allele of the gene participating in protein rebalancing can result in a large increase in accumulation of the heterologous protein of interest such as κ-Casein, Ovalbumin, Vitellogenin-2, and a chicken fibroblast growth factor as examples.

[0542] In some embodiments, the platform described herein enhances total protein accumulation by altering certain metabolic pathways such as nitrogen fixation or proteolysis activities. In certain embodiments, the platform focus on enhancing recombinant protein production. Approaches adopted to increase recombinant protein expression include but not limited to: i) using protein storage unit signal peptide or ER retention signal to facilitate protein accumulation; and ii) placing multiple expression cassettes to insert different optimized sequences encoding the same protein.

[0543] In some embodiments, the proteome rebalancing in crop seeds is achieved through amino acid rebalancing. In other embodiments, precise and efficient amino acid rebalancing can be achieved by gene-editing techniques taught in the present disclosure. In specific embodiments, both gene-editing cassette and multiple expression cassettes are introduced in the same binary vector, in order to maximize the recombinant protein production.

[0544] In some embodiments, an increased amount of a protein of interest can be produced in the seed. For example, the heterologous protein can be expressed from about 0.5%, 1%, 2%, 3%, 4%, 5%, 6%, 7%, 8%, 9%, 10%, 11%, 12%, 13%, 14%, 15%, 16%, 17%, 18%, 19%, 20%, 25%, 30%, 35%, 40%, 45%, 50%, 55%, 60%, 65%, 70%, 75%, 80%, or more of the total soluble protein in the seed.

[0545] In some embodiments, the dry weight of the heterologous protein can be expressed from about 0.1%, 0.2%, 0.3%, 0.4%, 0.5%, 0.6%, 0.7%, 0.8%, 0.9%, 1%, 2%, 3%, 4%, 5%, 6%, 7%, 8%, 9%, 10%, 11%, 12%, 13%, 14%, 15%, 16%, 17%, 18%, 19%, 20%, 25%, 30%, 35%, 40%, 45%, 50% or more of the total dry weight of the seed.

[0546] In some embodiments, the heterologous protein can be produced, for example, at an amount of about 0.1 mg, 0.2 mg, 0.3 mg, 0.4 mg, 0.5 mg, 0.6 mg, 0.7 mg, 0.8 mg, 0.9 mg, 1 mg, 2 mg, 3 mg, 4 mg, 5 mg, 6 mg, 7 mg, 8 mg, 9 mg, 10 mg, 15 mg, 20 mg, 25 mg, 30 mg, 35 mg, 40 mg, 45 mg, 50 mg, 100 mg, 150 mg, 200 mg, 250 mg, 300 mg, 350 mg or more protein per seed.

[0547] In some embodiments, the amount of heterologous protein produced can be measured on a per plant basis. The heterologous protein can be produced, for example, at an amount of about 0.1 g, 0.2 g, 0.3 g, 0.4 g, 0.5 g, 0.6 g, 0.7 g, 0.8 g, 0.9 g, 1 g, 2 g, 3 g, 4 g, 5 g, 6 g, 7 g, 8 g, 9 g, 10 g, 11 g, 12 g, 13 g, 14 g, 15 g, 16 g, 17 g, 18 g, 19 g, 20 g, 25 g, 30 g, 35 g, 40 g, 45 g, 50 g, 75 g, 100 g or more of heterologous protein per plant.

[0548] In some embodiments, the heterologous protein can be produced, for example, at an amount of about 0.5 pounds, 1 pound, 2 pounds, 3 pounds, 4 pounds, 5 pounds, 6 pounds, 7 pounds, 8 pounds, 9 pounds, 10 pounds, 15 pounds, 20 pounds, 25 pounds, 30 pounds, 40 pounds, 50 pounds, 75 pounds, 100 pounds, 200 pounds, 300 pounds, 400 pounds, 500 pounds, 600 pounds, 700 pounds, 800 pounds, 900 pounds, 1000 pounds, 1500 pounds, 2000 pounds, 3000 pounds, 4000 pounds, 5000 pounds, or more pounds per acre per season. The actual yield can depend on many parameters such as plants per acre, plant variety, soil quality, cultivating practices, plant stress, and also the level of purity of the heterologous protein to be produced.

### Suppression of Seed Storage Protein

[0549] Expression of pivotal storage proteins can be suppressed to a substantial portion of the plant's endogenous seed storage protein content or even be completely abolished by genetic engineering technologies taught in the present disclosure, such as gene-editing CRISPR-Cas system.

[0550] In some embodiments, a plant can be deficient in one or two more seed storage proteins that comprising globulin storage proteins (including 11S globulins and 7S globulins), 2S albumin storage proteins, prolamin storage proteins, or other seed storage proteins. In some embodiments, a plant of the present disclosure can be deficient in one or two more globulin storage proteins comprising glycinin (11S globulin) and conglycinin (7S globulins). Structures and biosynthesis of Seed Storage Proteins are known in the art, for example, shewry et al. (1995) Plant Cell 7:945-956, which is expressly incorporated herein by reference in its entirety.

[0551] Non-limiting example of the seed storage protein is Glycinin (11S), beta-conglycinin (7S) proteins, Cupin protein, lectin protein, trypsin and protease inhibitor proteins. In some embodiments, the present disclosure teaches suppression and repression of the seed storage protein including Glycinin (11S), beta-conglycinin (7S) proteins, Cupin protein, lectin protein, trypsin and protease inhibitor proteins using genetic engineering techniques described herein.

[0552] In an embodiment, genetic manipulation to create a deficiency of a seed storage protein can be obtained by methods such as gene editing, co-suppression, antisense, RNAi, or other methods. U.S. Pat. No. 5,190,931 describes exemplary methods of the use of an antisense construct to downregulate a gene. U.S. Pat. No. 5,231,020 describes exemplary methods of the use of a sense nucleic acid construct to downregulate a gene. Genetic inhibition the expression of a gene product by use of double-stranded mRNA is disclosed in U.S. Pat. No. 6,506,559.

[0553] “Gene suppression” refers to any of the well-known methods for reducing the levels of gene transcription to mRNA and/or subsequent translation of the mRNA. Gene suppression is also intended to mean the reduction of protein expression from a gene or a coding sequence including posttranscriptional gene suppression and transcriptional suppression. Posttranscriptional gene suppression is mediated by the homology between of all or a part of a mRNA transcribed from a gene or coding sequence targeted for suppression and the corresponding double stranded RNA used for suppression, and refers to the substantial and measurable reduction of the amount of available mRNA available in the cell for binding by ribosomes. The transcribed RNA can be in the sense orientation to effect what is called co-suppression, in the anti-sense orientation to effect what is called anti-sense suppression, or in both orientations producing a dsRNA to effect what is called RNA interference (RNAi).

[0554] Transcriptional suppression is mediated by the presence in the cell of a dsRNA gene suppression agent exhibiting substantial sequence identity to a promoter DNA sequence or the complement thereof to effect what is referred to as promoter trans suppression. Gene suppression may be effective against a native plant gene associated with a trait, e.g., to provide plants with reduced levels of a protein encoded by the native gene or with enhanced or reduced levels of an affected metabolite. Gene suppression can also be effective against target genes in plant pests that may ingest or contact plant material containing gene suppression agents, specifically designed to inhibit or suppress the expression of one or more homologous or complementary sequences in the cells of the pest. Post-transcriptional gene suppression by anti-sense or sense-oriented RNA to regulate gene expression in plant cells is disclosed in U.S. Pat. Nos. 5,107,065, 5,759,829, 5,283,184, and 5,231,020. The use of dsRNA to suppress genes in plants is disclosed in WO 99/53050, WO 99/49029, U.S. Patent Application Publication No. 2003/0175965, and 2003/0061626, U.S. patent application Ser. No. 10/465,800 (abandoned), and U.S. Pat. Nos. 6,506,559, and 6,326,193.

[0555] A method of post transcriptional gene suppression in plants employs both sense-oriented and anti-sense-oriented, transcribed RNA which is stabilized, e.g., as a hairpin and stem and loop structure. A preferred DNA construct for effecting post transcriptional gene suppression is one in which a first segment encodes an RNA exhibiting an anti-sense orientation exhibiting substantial identity to a segment of a gene targeted for suppression, which is linked to a second segment in sense orientation encoding an RNA exhibiting substantial complementarity to the first segment. Such a construct forms a stem and loop structure by hybridization of the first segment with the second segment and a loop structure from the nucleotide sequences linking the two segments (see WO94/01550, WO98/05770, US 2002/0048814, and US 2003/0018993).

[0556] In some embodiments, methods for achieving a deficiency of a seed storage protein are not transcriptional gene suppression or post transcriptional gene suppression via RNAi.

[0557] In some embodiments, genetic manipulation to create a deficiency of a seed storage protein can be obtained by methods for engineering plant genomes using CRISPR/CAS systems, which are well known in the art, such as U.S. Patent Application Publication Nos. 2018/0195089, US2016/0102322, US2015/0167000, US2014/0273235, US2019/0093107, US2017/0114351, and U.S. Pat. Nos. 9,790,490 and 9,879,283, each of which is expressly incorporated herein by reference in their entirety.

[0558] In other embodiments, a deficiency of a particular seed storage protein, or seed storage proteins in the aggregate, can also be attained by conventional breeding methods followed by screening for a low level of one or more seed proteins. A deficiency of a seed storage protein can also be attained by natural mutations or induced mutations, followed by screening methods to identify those plants having a low level of one or more seed storage proteins. In another embodiment, a plant having a deficiency of a seed storage protein can be obtained, for example, from a publicly available seed bank or seed repository.

[0559] While RNAi downregulates the gene expression, CRISPR/Cas gene-editing system knocks out the target gene. The present disclosure teaches transgenic seeds, in which one or more gene encoding seed storage proteins are knocked out by CRISPR/Cas systems, would free up more amino acids for production of heterologous proteins of interest.

[0560] As described above, RNAi knockdown is at transcriptional and/or post transcriptional level, which are reversible, while CRISPR/Cas9 mediated knockout can permanently remove a target gene, thereby suppressing and/or triggering a deficiency of protein encoded by said target gene, such as seed storage protein. In some embodiments, CRISPR/Cas systems can create mutant plants without foreign gene insertion in the progeny.

[0561] The present disclosure teaches that RNAi can only regulate gene expression, while CRISPR/Cas system can induce a variety of mutations such as frameshift mutation, truncated or loss-of-function protein, or even gene insertion as well.

[0562] The present disclosure teaches that RNAi silencing method suffers from high off-target effects, which contains two types: sequence-independent and sequence-dependent. For instance, siRNAs trigger an interferon activated pathway in certain cell types in a sequence-independent manner, resulting in increased expression of interferon-regulated genes (Ui-Tei, 2013, Front. Genet. 4:107 and Sledz et al, 2003, Nature Cell Bilogy 5(9):834) The CRISPR system has advanced rapidly with the help of efficient design tools that enable minimal off-target effects. A recent study comparing these two technologies revealed that CRISPR method is far less susceptible to systematic off-target effects (Smith et al, 2017, PLoS Biology 15(11), e2003213).

### Gene Editing

[0563] As used herein, the term “gene editing system” refers to a system comprising one or more DNA-binding domains or components and one or more DNA-modifying domains or components, or isolated nucleic acids, e.g., one or more vectors, encoding said DNA-binding and DNA-modifying domains or components. Gene editing systems are used for modifying the nucleic acid of a target gene and/or for modulating the expression of a target gene. In known gene editing systems, for example, the one or more DNA-binding domains or components are associated with the one or more DNA-modifying domains or components, such that the one or more DNA-binding domains target the one or more DNA-modifying domains or components to a specific nucleic acid site. Methods and compositions for enhancing gene editing is well known in the art. See example, U.S. Patent Application Publication No. 2018/0245065, which is incorporated by reference in its entirety.

[0564] Certain gene editing systems are known in the art, and include but are not limited to, zinc finger nucleases, transcription activator-like effector nucleases (TALENs); clustered regularly interspaced short palindromic repeats (CRISPR)/Cas systems, meganuclease systems, and viral vector-mediated gene editing.

[0565] In some embodiments, the present disclosure teaches methods for gene editing/cloning utilizing DNA nucleases. CRISPR complexes, transcription activator-like effector nucleases (TALENs), zinc finger nucleases (ZFNs), and FokI restriction enzymes, which are some of the sequence-specific nucleases that have been used as gene editing tools. These enzymes are able to target their nuclease activities to desired target loci through interactions with guide regions engineered to recognize sequences of interest. In some embodiments, the present disclosure teaches CRISPR-based gene editing methods.

### (i) CRISPR Systems

[0566] CRISPR (Clustered Regularly Interspaced Short Palindromic Repeats) and CRISPR-associated (cas) endonucleases were originally discovered as adaptive immunity systems evolved by bacteria and archaea to protect against viral and plasmid invasion. Naturally occurring CRISPR/Cas systems in bacteria are composed of one or more Cas genes and one or more CRISPR arrays consisting of short palindromic repeats of base sequences separated by genome-targeting sequences acquired from previously encountered viruses and plasmids (called spacers). (Wiedenheft, B., et. al. Nature. 2012; 482:331; Bhaya, D., et. al., Annu. Rev. Genet. 2011; 45:231; and Terms, M. P. et. al., Curr. Opin. Microbiol. 2011; 14:321). Bacteria and archaea possessing one or more CRISPR loci respond to viral or plasmid challenge by integrating short fragments of foreign sequence (protospacers) into the host chromosome at the proximal end of the CRISPR array. Transcription of CRISPR loci generates a library of CRISPR-derived RNAs (crRNAs) containing sequences complementary to previously encountered invading nucleic acids (Haurwitz, R. E., et. al., Science. 2012:329; 1355; Gesner, E. M., et. al., Nat. Struct. Mol. Biol. 2001:18; 688; Jinek, M., et. al., Science. 2012:337; 816-21). Target recognition by crRNAs occurs through complementary base pairing with target DNA, which directs cleavage of foreign sequences by means of Cas proteins. (Jinek et. al. 2012 “A Programmable dual-RNA-guided DNA endonuclease in adaptive bacterial immunity.” Science. 2012:337; 816-821).

[0567] There are at least five main CRISPR system types (Type I, II, III, IV and V) and at least 16 distinct subtypes (Makarova, K. S., et al., Nat Rev Microbiol. 2015. Nat. Rev. Microbiol. 13, 722-736). CRISPR systems are also classified based on their effector proteins. Class 1 systems possess multi-subunit crRNA-effector complexes, whereas in Class 2 systems all functions of the effector complex are carried out by a single protein (e.g., Cas9 or Cpf1). In some embodiments, the present disclosure provides using type II and/or type V single-subunit effector systems.

[0568] As these naturally occur in many different types of bacteria, the exact arrangements of the CRISPR and structure, function and number of Cas genes and their product differ somewhat from species to species. Haft et al. (2005) PLoS Comput. Biol. 1: e60; Kunin et al. (2007) Genome Biol. 8: R61; Mojica et al. (2005) J. Mol. Evol. 60: 174-182; Bolotin et al. (2005) Microbiol. 151: 2551-2561; Pourcel et al. (2005) Microbiol. 151: 653-663; and Stem et al. (2010) Trends. Genet. 28: 335-340. For example, the Cse (Cas subtype, E. coli) proteins (e.g., CasA) form a functional complex, Cascade, that processes CRISPR RNA transcripts into spacer-repeat units that Cascade retains. Brouns et al. (2008) Science 321: 960-964. In other prokaryotes, Cas6 processes the CRISPR transcript. The CRISPR-based phage inactivation in E. coli requires Cascade and Cas3, but not Cas1 or Cas2. The Cmr (Cas RAMP module) proteins in Pyrococcus furiosus and other prokaryotes form a functional complex with small CRISPR RNAs that recognizes and cleaves complementary target RNAs. A simpler CRISPR system relies on the protein Cas9, which is a nuclease with two active cutting sites, one for each strand of the double helix. Combining Cas9 and modified CRISPR locus RNA can be used in a system for gene editing. Pennisi (2013) Science 341: 833-836.

### (ii) CRISPR/Cas

[0569] In some embodiments, the present disclosure provides methods of gene editing using a Type II CRISPR system. Type II systems rely on a i) single endonuclease protein, ii) a transactiving crRNA (tracrRNA), and iii) a crRNA where a ˜20-nucleotide (nt) portion of the 5′ end of crRNA is complementary to a target nucleic acid. The region of a CRISPR crRNA strand that is complementary to its target DNA protospacer is hereby referred to as “guide sequence.”

[0570] In some embodiments, the tracrRNA and crRNA components of a Type II system can be replaced by a single guide RNA (sgRNA), also known as a guide RNA (gRNA). The sgRNA can include, for example, a nucleotide sequence that comprises an at least 12-20 nucleotide sequence complementary to the target DNA sequence (guide sequence) and can include a common scaffold RNA sequence at its 3′ end. As used herein, “a common scaffold RNA” refers to any RNA sequence that mimics the tracrRNA sequence or any RNA sequences that function as a tracrRNA.

[0571] Cas9 endonucleases produce blunt end DNA breaks, and are recruited to target DNA by a combination of a crRNA and a tracrRNA oligos, which tether the endonuclease via complementary hybridization of the RNA CRISPR complex.

[0572] In some embodiments, DNA recognition by the crRNA/endonuclease complex requires additional complementary base-pairing with a protospacer adjacent motif (PAM) (e.g., 5′-NGG-3′) located in a 3′ portion of the target DNA, downstream from the target protospacer. (Jinek, M., e. al., Science. 2012:337; 816-821). In some embodiments, the PAM motif recognized by a Cas varies for different Cas proteins. In some embodiments, a Cas is a Cas9.

[0573] In some embodiments the Cas9 disclosed herein can be any variant derived or isolated from any source. In other embodiments, the Cas9 peptide of the present disclosure can include one or more of the mutations described in the literature, including but not limited to the functional mutations described in: Fonfara et al. Nucleic Acids Res. 2014 February; 42(4):2577-90; Nishimasu H. et al. Cell. 2014 Feb. 27; 156(5):935-49; Jinek M. et al. Science. 2012 337:816-21; and Jinek M. et al. Science. 2014 Mar. 14; 343(6176); see also U.S. patent application Ser. No. 13/842,859, filed Mar. 15, 2013, which is hereby incorporated by reference; further, see U.S. Pat. Nos. 8,697,359; 8,771,945; 8,795,965; 8,865,406; 8,871,445; 8,889,356; 8,895,308; 8,906,616; 8,932,814; 8,945,839; 8,993,233; and 8,999,641, which are all hereby incorporated by reference. Thus, in some embodiments, the systems and methods disclosed herein can be used with the wild type Cas9 protein having double-stranded nuclease activity, Cas9 mutants that act as single stranded nickases, or other mutants with modified nuclease activity.

[0574] According to the present disclosure, Cas9 molecules of, derived from, or based on the Cas9 proteins of a variety of species can be used in the methods and compositions described herein. For example, Cas9 molecules of, derived from, or based on, e.g., S. pyogenes, S. thermophilus, Staphylococcus aureus and/or Neisseria meningitidis Cas9 molecules, can be used in the systems, methods and compositions described herein. Additional Cas9 species include: Acidovorax avenae, Actinobacillus pleuropneumoniae, Actinobacillus succinogenes, Actinobacillus suis, Actinomyces sp., cycliphilus denitrificans, Aminomonas paucivorans, Bacillus cereus, Bacillus smithii, Bacillus thuringiensis, Bacteroides sp., Blastopirellula marina, Bradyrhiz obium sp., Brevibacillus latemsporus, Campylobacter coli, Campylobacter jejuni, Campylobacter lad, Candidatus Puniceispirillum, Clostridiu cellulolyticum, Clostridium perfringens, Corynebacterium accolens, Corynebacterium diphtheria, Corynebacterium matruchotii, Dinoroseobacter sliibae, Eubacterium dolichum, gamma proteobacterium, Gluconacetobacler diazotrophicus, Haemophilus parainfluenzae, Haemophilus sputorum, Helicobacter canadensis, Helicobacter cinaedi, Helicobacter mustelae, Ilyobacler polytropus, Kingella kingae, Lactobacillus crispatus, Listeria ivanovii, Listeria monocytogenes, Listeriaceae bacterium, Methylocystis sp., Methylosinus trichosporium, Mobiluncus mulieris, Neisseria bacilliformis, Neisseria cinerea, Neisseria flavescens, Neisseria lactamica. Neisseria sp., Neisseria wadsworthii, Nitrosomonas sp., Parvibaculum lavamentivorans, Pasteurella multocida, Phascolarctobacterium succinatutens, Ralstonia syzygii, Rhodopseudomonas palustris, Rhodovulum sp., Simonsiella muelleri, Sphingomonas sp., Sporolactobacillus vineae, Staphylococcus lugdunensis, Streptococcus sp., Subdoligranulum sp., Tislrella mobilis, Treponema sp., or Verminephrobacter eiseniae.

[0575] In some embodiments, the present disclosure teaches the use of tools for genome editing techniques in plants such as crops and methods of gene editing using CRISPR-associated (cas) endonucleases including SpyCas9, SaCas9, St1Cas9. These powerful tools for genome editing, which can be applied to plant genome editing are well known in the art. See example, Song et al. (2016), CRISPR/Cas9: A powerful tool for crop genome editing, The Crop Journal 4:75-82, Mali et al. (2013) RNA-guided human genome engineering via cas9, Science 339: 823-826; Ran et al. (2015) In vivo genome editing using Staphylococcus aureus cas9, Nature 520: 186-191; Esvelt et al. (2013) Orthogonal cas9 proteins for ma-guided gene regulation and editing, Nature methods 10(11): 1116-1121, each of which is hereby incorporated by reference in its entirety for all purposes.

(iii) CRISPR/Cpf1

[0576] In some embodiments, the present disclosure provides methods of gene editing using a Type V CRISPR system. In some embodiments, the present disclosure provides methods of gene editing using CRISPR from Prevotella, Francisella, Acidaminococcus, Lachnospiraceae, and Moraxella (Cpf1).

[0577] The Cpf1 CRISPR systems of the present disclosure comprise i) a single endonuclease protein, and ii) a crRNA, wherein a portion of the 3′ end of crRNA contains the guide sequence complementary to a target nucleic acid. In this system, the Cpf1 nuclease is directly recruited to the target DNA by the crRNA. In some embodiments, guide sequences for Cpf1 must be at least 12 nt, 13 nt, 14 nt, 15 nt, or 16 nt in order to achieve detectable DNA cleavage, and a minimum of 14 nt, 15 nt, 16 nt, 17 nt, or 18 nt to achieve efficient DNA cleavage.

[0578] The Cpf1 systems of the present disclosure differ from Cas9 in a variety of ways. First, unlike Cas9, Cpf1 does not require a separate tracrRNA for cleavage. In some embodiments, Cpf1 crRNAs can be as short as about 42-44 bases long—of which 23-25 nt is guide sequence and 19 nt is the constitutive direct repeat sequence. In contrast, the combined Cas9 tracrRNA and crRNA synthetic sequences can be about 100 bases long.

[0579] Second, certain Cpf1 systems prefer a “TTN” PAM motif that is located 5′ upstream of its target. This is in contrast to the “NGG” PAM motifs located on the 3′ of the target DNA for common Cas9 systems such as Streptococcus pyogenes Cas9. In some embodiments, the uracil base immediately preceding the guide sequence cannot be substituted (Zetsche, B. et al. 2015. “Cpf1 Is a Single RNA-Guided Endonuclease of a Class 2 CRISPR-Cas System” Cell 163, 759-771, which is hereby incorporated by reference in its entirety for all purposes).

[0580] Third, the cut sites for Cpf1 are staggered by about 3-5 bases, which create “sticky ends” (Kim et al., 2016. “Genome-wide analysis reveals specificities of Cpf1 endonucleases in human cells” published online Jun. 6, 2016). These sticky ends with 3-5 nt overhangs are thought to facilitate NHEJ-mediated-ligation, and improve gene editing of DNA fragments with matching ends. The cut sites are in the 3′ end of the target DNA, distal to the 5′ end where the PAM is. The cut positions usually follow the 18th base on the non-hybridized strand and the corresponding 23rd base on the complementary strand hybridized to the crRNA.

[0581] Fourth, in Cpf1 complexes, the “seed” region is located within the first 5 nt of the guide sequence. Cpf1 crRNA seed regions are highly sensitive to mutations, and even single base substitutions in this region can drastically reduce cleavage activity (see Zetsche B. et al. 2015 “Cpf1 Is a Single RNA-Guided Endonuclease of a Class 2 CRISPR-Cas System” Cell 163, 759-771). Critically, unlike the Cas9 CRISPR target, the cleavage sites and the seed region of Cpf1 systems do not overlap. Additional guidance on designing Cpf1 crRNA targeting oligos is available on Zetsche B. et al. 2015. (“Cpf1 Is a Single RNA-Guided Endonuclease of a Class 2 CRISPR-Cas System” Cell 163, 759-771).

(iv) Guide RNA (gRNA)

[0582] In some embodiments, the guide RNA of the present disclosure comprises two coding regions, encoding for crRNA and tracrRNA, respectively. In other embodiments, the guide RNA is a single guide RNA (sgRNA) synthetic crRNA/tracrRNA hybrid. In other embodiments, the guide RNA is a crRNA for a Cpf1 endonuclease.

[0583] Persons having skill in the art will appreciate that, unless otherwise noted, all references to a single guide RNA (sgRNA) in the present disclosure can be read as referring to a guide RNA (gRNA). Therefore, embodiments described in the present disclosure which refer to a single guide RNA (sgRNA) will also be understood to refer to a guide RNA (gRNA).

[0584] The guide RNA is designed so as to recruit the CRISPR endonuclease to a target DNA region. In some embodiments, the present disclosure teaches methods of identifying viable target CRISPR landing sites, and designing guide RNAs for targeting the sites. For example, in some embodiments, the present disclosure teaches algorithms designed to facilitate the identification of CRISPR landing sites within target DNA regions.

[0585] In some embodiments, the present disclosure teaches use of software programs designed to identify candidate CRISPR target sequences on both strands of an input DNA sequence based on desired guide sequence length and a CRISPR motif sequence (PAM, protospacer adjacent motif) for a specified CRISPR enzyme. For example, target sites for Cpf1 from Francisella novicida U112, with PAM sequences TTN, may be identified by searching for 5′-TTN-3′ both on the input sequence and on the reverse-complement of the input. The target sites for Cpf1 from Lachnospiraceae bacterium and Acidaminococcus sp., with PAM sequences TTTN, may be identified by searching for 5′-TTTN-3′ both on the input sequence and on the reverse complement of the input. Likewise, target sites for Cas9 of S. thermophilus CRISPR, with PAM sequence NNAGAAW, may be identified by searching for 5′-Nx-NNAGAAW-3′ both on the input sequence and on the reverse-complement of the input. The PAM sequence for Cas9 of S. pyogenes is 5′-NGG-3′.

[0586] Since multiple occurrences in the genome of the DNA target site may lead to nonspecific genome editing, after identifying all potential sites, sequences may be filtered out based on the number of times they appear in the relevant reference genome or modular CRISPR construct. For those CRISPR enzymes for which sequence specificity is determined by a ‘seed’ sequence (such as the first 5 bp of the guide sequence for Cpf1-mediated cleavage) the filtering step may also account for any seed sequence limitations.

[0587] In some embodiments, algorithmic tools can also identify potential off target sites for a particular guide sequence. For example, in some embodiments Cas-Offinder can be used to identify potential off target sites for Cpf1 (see Kim et al., 2016. “Genome-wide analysis reveals specificities of Cpf1 endonucleases in human cells” Nature Biotechnology 34, 863-868). Any other publicly available CRISPR design/identification tool may also be used, including for example the Zhang lab crispr.mit.edu tool (see Hsu, et al. 2013 “DNA targeting specificity of RNA guided Cas9 nucleases” Nature Biotech 31, 827-832).

[0588] In some embodiments, the user may be allowed to choose the length of the seed sequence. The user may also be allowed to specify the number of occurrences of the seed: PAM sequence in a genome for purposes of passing the filter. The default is to screen for unique sequences. Filtration level is altered by changing both the length of the seed sequence and the number of occurrences of the sequence in the genome. The program may in addition or alternatively provide the sequence of a guide sequence complementary to the reported target sequence(s) by providing the reverse complement of the identified target sequence(s).

[0589] In the guide RNA, the “spacer/guide sequence” sequence is complementary to the protospacer sequence in the DNA target. The gRNA “scaffold” for a single stranded gRNA structure is recognized by the Cas protein.

[0590] In some embodiments, the transgenic plant, plant part, plant cell, or plant tissue culture taught in the present disclosure comprise a recombinant construct, which comprises at least one nucleic acid sequence encoding a guide RNA. In some embodiments, the nucleic acid is operably linked to a promoter. In some embodiments, the promoter is MtU6 promoter. In other embodiments, a recombinant construct further comprises a nucleic acid sequence encoding a Clustered regularly interspaced short palindromic repeats (CRISPR) endonuclease. In other embodiments, the guide RNA is capable of forming a complex with said CRISPR endonuclease, and said complex is capable of binding to and creating a double strand break in a genomic target sequence of said plant genome. In other embodiments, the CRISPR endonuclease is Cas9.

[0591] In some embodiments, the target sequence is a nucleic acid sequence encoding a seed storage protein. Most seed proteins are members of the cupin superfamily (e.g. legumins and vicilins), but in some dicotyledonous seeds, lectins are abundant, whereas in cereal grains, the prolamins and to a lesser extent the legumins are abundant. Non-limiting example of the seed storage protein is Glycinin (11S), beta-conglycinin (7S) proteins, Cupin protein, lectin protein, trypsin and protease inhibitor proteins. In some embodiments, the present disclosure teaches suppression and repression of the seed storage protein including Glycinin (11S), beta-conglycinin (7S) proteins, Cupin protein, lectin protein, trypsin and protease inhibitor proteins using genetic engineering techniques described herein.

[0592] Seed crops such as soybean plants are propagated for the stored protein, oil, and carbohydrates that specifically accumulate in seeds. Seeds accumulate protein as a source of carbon, nitrogen, and sulfur as well as triglycerides and carbohydrate reserves, which are used as a source of carbon and ultimately energy.

[0593] The present disclosure teaches the targeted gene-editing techniques for silencing, suppressing, or repressing expression of seed storage proteins including Glycinin (11S), beta-conglycinin (7S) proteins, Cupin protein, lectin protein, trypsin and protease inhibitor proteins. In some embodiments, the present disclosure teaches the targeted gene-editing techniques for silencing, suppressing, or repressing expression of soybean seed storage proteins, including, but not limited to β-conglycinin α, β-conglycinin α′, β-conglycinin β, Cysteine Protease, Glycinin 1, Glycinin 2, Glycinin 3, Glycinin 4, Glycinin 5, Glycinin 7, Kunitz-type Trypsin inhibitor, and Lectin. In other embodiments, the present disclosure teaches the targeted gene-editing techniques for silencing, suppressing, or repressing expression of β-conglycinin α, β-conglycinin α′, β-conglycinin J, Glycinin 1, Glycinin 4, Glycinin 5 and Kunitz-Trypsin inhibitor. In further embodiments, the present disclosure teaches the targeted gene-editing techniques for silencing, suppressing, or repressing expression of β-conglycinin α′, Glycinin 4 and Glycinin 5.

[0594] In some embodiments, seed storage proteins to be targeted for knock-out are not selected based on the size (e.g. molecular weight) of target protein but selected based on amino acid rebalancing profile taught in the present disclosure.

[0595] In some embodiments, the transgenic plant disclosed herein produces a seed with a rebalanced storage protein level when a gene encoding the storage protein is mutated by a gene-editing technique. In other embodiments, the level of proteins of interest in transgenic plants increases in seeds of the transgenic plants with the rebalanced storage protein level, when compared to seeds produced from a non-rebalanced transgenic plant. In further embodiments, the non-rebalanced transgenic plant has the recombinant DNA construct without mutation in the gene encoding the storage protein.

[0596] In some embodiments of the amino acid rebalancing based method, the disrupting of expression of the endogenous target gene is carried out by a gene-editing technology. In some embodiments, the gene-editing technology is a CRISPR/Cas system. In some embodiments, said CRISPR system comprises a nucleic acid molecule and an enzymatic protein, wherein the nucleic acid molecule is a guide RNA (gRNA) molecule, and the enzymatic protein is a Cas protein or Cas ortholog. In some embodiments, the disrupting of expression of the endogenous target gene does not utilize an RNAi-based technology. In some embodiments, the disruption is not due to the presence of an RNAi, an double-stranded RNA, an antisense or a sense fragment of the endogenous target gene. In some embodiments, at least two expression cassettes are stacked in tandem in the expression vector.

### Identification of Recombinant Plants

[0597] In some embodiments, recombinant plants of the disclosure are modified to express a trait to aid in their identification during processing, shipment, storage, and any upstream use ahead of processing for a food product. In some embodiments, the trait is phenotypic. In some embodiments, the trait is genetic. In some embodiments, the trait is not present in an end-product. That is, in some embodiments, the marker is designed so as to not be present in downstream processing of a grain, bean, fruit, or other plant part. In some embodiments, the trait is reduced or eliminated in an end-product. Various end-products are described herein and comprise at least a consumable or edible product.

[0598] When the trait is phenotypic, any portion of the plant can be modified to express the trait. In some embodiments, a plant is a soybean plant, and a phenotypic trait is expressed in a portion of the soybean selected from the group consisting of: testa, root, hilum, raphe, cotyledon, plumule, meristem, epicotyl, hypocotyl, microphyle, and combinations thereof. In some embodiments, the testa (e.g., seed coat) of the plant expresses a phenotypic trait. In some embodiments, the testa is modified to express a pigment. In some embodiments, the palisade layer of the testa is modified to express a pigment. In some embodiments, the parenchyma layer of a soybean expresses a pigment. In some embodiments, the parenchyma layer of a soybean does not expresses a pigment.

[0599] Phenotypic traits that can be expressed by recombinant plants of the disclosure can comprise a pigment or metabolite. In some embodiments, a pigment is selected from the group consisting of flavonoids (phlobaphenes, isoflavonoids, flavanones, flavones, flavonols, proanthocyanidins, anthocyanins), stilbenes, phenolic acids, monolignols, and combinations thereof. In some emboidments, a pigment comprises an anthocyanin. Anthocyanins are colored water-soluble pigments belonging to the phenolic group. The pigments are in glycosylated forms. Anthocyanins are responsible for the colors, red, purple, and blue. Therefore, in some embodiments, a portion of a plant (e.g., a soybean) comprises a red, purple, and/or blue pigment. In some embodiments, a portion of a soybean selected from the group consisting of testa, root, hilum, raphe, cotyledon, plumule, meristem, epicotyl, hypocotyl, microphyle, and combinations thereof expresses a red, purple, and/or blue pigment.

[0600] Any methods may be utilized to modify a soybean to express a pigment. Exemplary strategies are described herein at Example 23.

### Quantification of Recombinant Protein

[0601] Plants provide a platform for the production of recombinant proteins in terms of scalability, safety, and/or cost-effectiveness and thus serve as an alternative to conventional fermentation systems that use bacteria, yeast or mammalian cells. In some embodiments, conventional systems comprising bacteria, yeast, and/or mammalian cells may not be viable options to express a recombinant protein. In some embodiments, a system comprising bacteria may not be utilized to express a recombinant protein, such as any of the fusion proteins provided herein.

[0602] Accordingly, provided are methods comprising expressing a recombining protein in a plant. Also provided are methods of increasing yield of recombinant milk protein per acre in a soybean plant. Expressing recombinant milk proteins in plants has advantages such as ease of scaling up, low growth cost, optimized growth procedures, ease of producing complex proteins (e.g., fusion proteins), and/or low risk of contamination with human pathogens. As described herein, any plant can be utilized in the described methods. In some embodiments, the plant is a soybean plant.

[0603] In some embodiments, the yield of recombinant protein is determined at one or both of the transcriptional and post-transcriptional level.

[0604] In some embodiments, a method provided herein comprises determining weight of a recombinant protein expressed in a plant. The plant can be of any age, in some embodiments the plant is at least about 1, 2, 3, 4, 5, 6, 7, 8, 9, or up to about 10 months old. In some embodiments, the plant is at least about 1-2, 2-4, 3-5, 1-4, 2-6, or about 3-4 months old. Methods of determining weight of a recombinant protein can comprise grounding at least a portion of a plant. The portion of a plant can be at least a portion of a leaf, stem, seed, root, or combinations thereof. In some embodiments, a recombinant protein is selected from any of the proteins described herein. In some embodiments, the recombinant protein comprises a fusion protein. In some embodiments, the recombinant protein comprises a milk protein.

[0605] In some embodiments, a method provided herein comprises determining weight of recombinant milk protein. Any methods of determining weight of recombinant protein can be utilized. Suitable methods of determining weight of a recombinant protein can comprise: western blot, southern blot, northern blot, ELISA, and combinations thereof. In some embodiments, an assay utilizes a Malvern Mastersizer light scatter device.

[0606] In some embodiments, a method comprises determining expression of a recombinant protein. In an exemplary method, total RNA can be isolated by grinding young leaves or seeds collected from 3-4 month-old plants followed by northern blot analysis and RNA probe labelling and hybridization. In some embodiments, a method comprises grounding at least a portion of a plant suspected of expressing the recombinant protein (e.g., seed), contacting the ground portion with a solution comprising a lysis buffer, thereby forming a lysate. The lysate can then be centrifuged and/or run on a gel followed by contact with an antibody targeting a protein of interest. In some embodiments, the protein of interest comprises a milk protein.

[0607] In some embodiments, hulled beans are macerated/crushed/blended in an aqueous solution, and then filtered. Protein within the resulting filtrate is then separated via alcohol or acid precipitation followed by a second optional filtration. Recovered protein is then dried and weighed.

[0608] In some embodiments, at least about 2 lbs., 2.3 lbs., 2.6 lbs., 2.9 lbs., 3.2 lbs., 3.5 lbs., 3.8 lbs., 4.1 lbs., 4.4 lbs., 4.7 lbs., 5 lbs., 5.3 lbs., 5.6 lbs., 5.9 lbs., 6.2 lbs., 6.5 lbs., 6.8 lbs., 7.1 lbs., 7.4 lbs., 7.7 lbs., 8 lbs., or up to about 8.5 lbs. per acre of recombinant protein are generated. In some embodiments, at least about 2-3 lbs., 2-5 lbs., 4-6 lbs, 5-7 lbs., 5.5-6.5 lbs, or 5-6.5 lbs per acre of recombinant protein are generated. In some embodiments at least about 6.0 lbs. per acre of recombinant protein are generated. In some embodiments, up to about 1000 lbs./acre of recombinant protein are generated. In some embodiments, up to about 500 lbs./acre, 525 lbs./acre, 550 lbs./acre, 575 lbs./acre, 600 lbs./acre, 625 lbs./acre, 650 lbs./acre, 675 lbs./acre, 700 lbs./acre, 725 lbs./acre, 750 lbs./acre, 775 lbs./acre, 800 lbs./acre, 825 lbs./acre, 850 lbs./acre, 875 lbs./acre, 900 lbs./acre, 925 lbs./acre, 950 lbs./acre, 975 lbs./acre, or up to about 1000 lbs./acre of recombinant protein are generated.

[0609] In some embodiments, at least about 0.1 lbs./bushel, 0.2 lbs./bushel, 0.5 lbs./bushel 1 lbs./bushel 1.5 lbs./bushel 2 lbs./bushel 2.5 lbs./bushel 3 lbs./bushel 3.5 lbs./bushel 4 lbs./bushel 4.5 lbs./bushel 5 lbs./bushel 5.5 lbs./bushel 6 lbs./bushel 6.5 lbs./bushel 7 lbs./bushel 7.5 lbs./bushel 8 lbs./bushel 8.5 lbs./bushel 9 lbs./bushel 9.5 lbs./bushel 10 lbs./bushel 10.5 lbs./bushel 11 lbs./bushel 11.5 lbs./bushel 12 lbs./bushel 12.5 lbs./bushel 13 lbs./bushel 13.5 lbs./bushel 14 lbs./bushel 14.5 lbs./bushel 15 lbs./bushel of a recombinant protein are generated. In some embodiments, a plurality of transgenic soybean seed produce in the aggregate at least 0.21 pounds of recombinant milk protein per bushel.

[0610] In some embodiments, at least about 0.5%, 1%, 1.5%, 2%, 2.5%, 3%, 3.5%, 4%, 4.5%, 5%, 5.5%, 6%, 6.5%, 7%, 7.5%, 8%, 8.5%, 9%, 9.5%, 10%, 10.5%, 11%, 11.5%, 12%, 12.5%, 13%, 13.5%, 14%, 14.5%, 15%, 15.5%, 16%, 16.5%, 17%, 17.5%, 18%, 18.5%, 19%, 19.5%, 20%, 20.5%, 21%, 21.5%, 22%, 22.5%, 23%, 23.5%, 24%, 24.5%, 25%, 25.5%, 26%, 26.5%, 27%, 27.5%, 28%, 28.5%, 29%, 29.5%, 30%, 30.5%, 31%, 31.5%, 32%, 32.5%, 33%, 33.5%, 34%, 34.5%, 35%, 35.5%, 36%, 36.5%, 37%, 37.5%, 38%, 38.5%, 39%, 39.5%, 40%, 40.5%, 41%, 41.5%, 42%, 42.5%, 43%, 43.5%, 44%, 44.5%, 45%, 45.5%, 46%, 46.5%, 47%, 47.5%, 48%, 48.5%, 49%, 49.5%, 50%, 50.5%, 51%, 51.5%, 52%, 52.5%, 53%, 53.5%, 54%, 54.5%, 55%, 55.5%, 56%, 56.5%, 57%, 57.5%, 58%, 58.5%, 59%, 59.5%, 60%, 60.5%, 61%, 61.5%, 62%, 62.5%, 63%, 63.5%, 64%, 64.5%, 65%, 65.5%, 66%, 66.5%, 67%, 67.5%, 68%, 68.5%, 69%, 69.5%, 70%, 70.5%, 71%, 71.5%, 72%, 72.5%, 73%, 73.5%, 74%, 74.5%, or up to about 75% of total protein weight of a plant seed mass of recombinant protein is generated.

[0611] In some embodiments, a transgenic seed produces at least about: 0.5 mg/seed, 1 mg/seed, 1.5 mg/seed, 2 mg/seed, 2.5 mg/seed, 3 mg/seed, 3.5 mg/seed, 4 mg/seed, 4.5 mg/seed, 5 mg/seed, 5.5 mg/seed, 6 mg/seed, 6.5 mg/seed, 7 mg/seed, 7.5 mg/seed, 8 mg/seed, 8.5 mg/seed, 9 mg/seed, 9.5 mg/seed, 10 mg/seed, 10.5 mg/seed, 11 mg/seed, 11.5 mg/seed, 12 mg/seed, 12.5 mg/seed, 13 mg/seed, 13.5 mg/seed, 14 mg/seed, 14.5 mg/seed, 15 mg/seed, 15.5 mg/seed, 16 mg/seed, 16.5 mg/seed, 17 mg/seed, 17.5 mg/seed, 18 mg/seed, 18.5 mg/seed, 19 mg/seed, 19.5 mg/seed, 20 mg/seed, 20.5 mg/seed, 21 mg/seed, 21.5 mg/seed, 22 mg/seed, 22.5 mg/seed, 23 mg/seed, 23.5 mg/seed, 24 mg/seed, 24.5 mg/seed, 25 mg/seed, 25.5 mg/seed, 26 mg/seed, 26.5 mg/seed, 27 mg/seed, 27.5 mg/seed, 28 mg/seed, 28.5 mg/seed, 29 mg/seed, 29.5 mg/seed, 30 mg/seed of recombinant protein. In some embodiments, the seed is of any plant described herein. In some embodiments, the seed is a soybean seed.

[0612] In some embodiments, a transgenic soybean seed in a mature fruit pod produces at least about 0.5 mg/seed, 1 mg/seed, 1.5 mg/seed, 2 mg/seed, 2.5 mg/seed, 3 mg/seed, 3.5 mg/seed, 4 mg/seed, 4.5 mg/seed, 5 mg/seed, 5.5 mg/seed, 6 mg/seed, 6.5 mg/seed, 7 mg/seed, 7.5 mg/seed, 8 mg/seed, 8.5 mg/seed, 9 mg/seed, 9.5 mg/seed, 10 mg/seed, 10.5 mg/seed, 11 mg/seed, 11.5 mg/seed, 12 mg/seed, 12.5 mg/seed, 13 mg/seed, 13.5 mg/seed, 14 mg/seed, 14.5 mg/seed, 15 mg/seed, 15.5 mg/seed, 16 mg/seed, 16.5 mg/seed, 17 mg/seed, 17.5 mg/seed, 18 mg/seed, 18.5 mg/seed, 19 mg/seed, 19.5 mg/seed, 20 mg/seed, 20.5 mg/seed, 21 mg/seed, 21.5 mg/seed, 22 mg/seed, 22.5 mg/seed, 23 mg/seed, 23.5 mg/seed, 24 mg/seed, 24.5 mg/seed, 25 mg/seed, 25.5 mg/seed, 26 mg/seed, 26.5 mg/seed, 27 mg/seed, 27.5 mg/seed, 28 mg/seed, 28.5 mg/seed, 29 mg/seed, 29.5 mg/seed, 30 mg/seed of recombinant protein. In some embodiments, the seed is of any plant described herein. In some embodiments, the seed is a soybean seed.

[0613] In some embodiments, a plurality of genetically modified plant (e.g., soybean) seeds produce in the aggregate at least about 2 lbs./acre, 27 lbs./acre, 52 lbs./acre, 77 lbs./acre, 102 lbs./acre, 127 lbs./acre, 152 lbs./acre, 177 lbs./acre, 202 lbs./acre, 227 lbs./acre, 252 lbs./acre, 277 lbs./acre, 302 lbs./acre, 327 lbs./acre, 352 lbs./acre, 377 lbs./acre, 402 lbs./acre, 427 lbs./acre, 452 lbs./acre, 477 lbs./acre, 502 lbs./acre, 527 lbs./acre, 552 lbs./acre, 577 lbs./acre, 602 lbs./acre, 627 lbs./acre, 652 lbs./acre, 677 lbs./acre, 702 lbs./acre, 727 lbs./acre, 752 lbs./acre, 777 lbs./acre, 802 lbs./acre, 827 lbs./acre, 852 lbs./acre, 877 lbs./acre, 902 lbs./acre, 927 lbs./acre, 952 lbs./acre, 977 lbs./acre, or up to about 1000 lbs./acre of recombinant protein.

### Agricultural Compositions

[0614] The recombinant plants described herein, and/or having characteristics as described herein, can be exposed to any of a number of agricultural formulations. These agricultural formulations can be added to the plant in the form of a liquid, a foam, or a dry product (e.g. to seeds of the plants, in furrow, foliar, etc.).

[0615] The agricultural compositions may be added to the recombinant plants to improve plant traits. In some examples, one or more compositions may be coated onto a seed. In some examples, one or more compositions may be coated onto a seedling. In some examples, one or more compositions may be coated onto a surface of a seed. In some examples, one or more compositions may be coated as a layer above a surface of a seed. In some examples, a composition that is coated onto a seed may be in liquid form, in dry product form, in foam form, in a form of a slurry of powder and water, or in a flowable seed treatment. In some examples, one or more compositions may be applied to a seed and/or seedling by spraying, immersing, coating, encapsulating, and/or dusting the seed and/or seedling with the one or more compositions.

[0616] Examples of agricultural compositions that may be added to the recombinant plants taught herein can include seed coatings for commercially important agricultural crops, for example, seed coatings for corn, soybean, canola, sorghum, potato, rice, vegetables, cereals, and oilseeds. In some examples, compositions may be sprayed on the plant aerial parts, or applied to the roots by inserting into furrows in which the plant seeds are planted, watering to the soil, or dipping the roots in a suspension of the composition. In some examples, compositions may be supplemented with trace metal ions, such as molybdenum ions, iron ions, manganese ions, or combinations of these ions. The agricultural compositions described herein can improve plant traits of the recombinant plants, such as promoting plant growth, maintaining high chlorophyll content in leaves, increasing fruit or seed numbers, and increasing fruit or seed unit weight (e.g. larger soybean yield).

[0617] Alternatively, the compositions may be inserted directly into the furrows into which the seed is planted or sprayed onto the plant leaves or applied by dipping the roots into a suspension of the composition. An effective amount of the composition can be used. In general, an effective amount is an amount sufficient to result in plants with improved traits (e.g. a desired soybean yield).

[0618] The formulation useful for these agricultural composition embodiments may include at least one member selected from the group consisting of: a tackifier, a microbial stabilizer, a fungicide, an antibacterial agent, a preservative, a stabilizer, a surfactant, an anti-complex agent, an herbicide, a nematicide, an insecticide, a plant growth regulator, a fertilizer, a rodenticide, a dessicant, a bactericide, a nutrient, and any combination thereof.

[0619] Any of the compositions described herein can include an agriculturally acceptable carrier. The carrier can be a solid carrier or liquid carrier, and in various forms including microspheres, powders, emulsions and the like. The carrier may be any one or more of a number of carriers that confer a variety of properties, such as increased stability, wettability, or dispersability. Wetting agents such as natural or synthetic surfactants, which can be nonionic or ionic surfactants, or a combination thereof can be included in the composition. Suitable formulations that may be prepared include wettable powders, granules, gels, agar strips or pellets, thickeners, and the like, microencapsulated particles, and the like, liquids such as aqueous flowables, aqueous suspensions, water-in-oil emulsions, etc.

[0620] In some embodiments, the agricultural carrier may be soil or a plant growth medium. Other agricultural carriers that may be used include water, fertilizers, plant-based oils, humectants, or combinations thereof. Alternatively, the agricultural carrier may be a solid, such as diatomaceous earth, loam, silica, alginate, clay, bentonite, zeolite, vermiculite, seed cases, other plant and animal products, or combinations, including granules, pellets, or suspensions. Mixtures of any of the aforementioned ingredients are also contemplated as carriers, such as but not limited to, pesta (flour and kaolin clay), agar or flour-based pellets in loam, sand, or clay, etc.

### Fertilizers

[0621] A fertilizer can be used to help promote the growth or provide nutrients to a seed, seedling, or plant. Non-limiting examples of fertilizers include nitrogen, phosphorous, potassium, calcium, sulfur, magnesium, boron, chloride, manganese, iron, zinc, copper, molybdenum, and selenium (or a salt thereof). Additional examples of fertilizers include one or more amino acids, salts, carbohydrates, vitamins, glucose, NaCl, yeast extract, NH₄H₂PO₄, (NH₄)₂SO₄, glycerol, valine, L-leucine, lactic acid, propionic acid, succinic acid, malic acid, citric acid, KH tartrate, xylose, lyxose, and lecithin. In one embodiment, the formulation can include a tackifier or adherent (referred to as an adhesive agent) to help bind other active agents to a substance (e.g., a surface of a seed). In one embodiment, adhesives are selected from the group consisting of: alginate, gums, starches, lecithins, formononetin, polyvinyl alcohol, alkali formononetinate, hesperetin, polyvinyl acetate, cephalins, Gum Arabic, Xanthan Gum, Mineral Oil, Polyethylene Glycol (PEG), Polyvinyl pyrrolidone (PVP), Arabino-galactan, Methyl Cellulose, PEG 400, Chitosan, Polyacrylamide, Polyacrylate, Polyacrylonitrile, Glycerol, Triethylene glycol, Vinyl Acetate, Gellan Gum, Polystyrene, Polyvinyl, Carboxymethyl cellulose, Gum Ghatti, and polyoxyethylene-polyoxybutylene block copolymers.

### Adhesives

[0622] In some embodiments, the agricultural compositions comprise an adhesive, and adhesives can be, e.g., a wax such as carnauba wax, beeswax, Chinese wax, shellac wax, spermaceti wax, candelilla wax, castor wax, ouricury wax, and rice bran wax, a polysaccharide (e.g., starch, dextrins, maltodextrins, alginate, and chitosans), a fat, oil, a protein (e.g., gelatin and zeins), gum arables, and shellacs. Adhesive agents can be non-naturally occurring compounds, e.g., polymers, copolymers, and waxes. For example, non-limiting examples of polymers that can be used as an adhesive agent include: polyvinyl acetates, polyvinyl acetate copolymers, ethylene vinyl acetate (EVA) copolymers, polyvinyl alcohols, polyvinyl alcohol copolymers, celluloses (e.g., ethylcelluloses, methylcelluloses, hydroxymethylcelluloses, hydroxypropylcelluloses, and carboxymethylcelluloses), polyvinylpyrolidones, vinyl chloride, vinylidene chloride copolymers, calcium lignosulfonates, acrylic copolymers, polyvinylacrylates, polyethylene oxide, acylamide polymers and copolymers, polyhydroxyethyl acrylate, methylacrylamide monomers, and polychloroprene.

### Surfactants

[0623] Non-limiting examples of surfactants include nitrogen-surfactant blends such as Prefer 28 (Cenex), Surf-N(US), Inhance (Brandt), P-28 (Wilfarm) and Patrol (Helena); esterified seed oils include Sun-It II (AmCy), MSO (UAP), Scoil (Agsco), Hasten (Wilfarm) and Mes-100 (Drexel); and organo-silicone surfactants include Silwet L77 (UAP), Silikin (Terra), Dyne-Amic (Helena), Kinetic (Helena), Sylgard 309 (Wilbur-Ellis) and Century (Precision). In one embodiment, the surfactant is present at a concentration of between 0.01% v/v to 10% v/v. In another embodiment, the surfactant is present at a concentration of between 0.1% v/v to 1% v/v.

### Fungicides

[0624] In some examples, a fungicide may include a compound or agent, whether chemical or biological, that can inhibit the growth of a fungus or kill a fungus. In some examples, a fungicide may include compounds that may be fungistatic or fungicidal. In some examples, fungicide can be a protectant, or agents that are effective predominantly on the seed surface, providing protection against seed surface-borne pathogens and providing some level of control of soil-borne pathogens. Non-limiting examples of protectant fungicides include captan, maneb, thiram, or fludioxonil.

[0625] In some examples, fungicide can be a systemic fungicide, which can be absorbed into the emerging seedling and inhibit or kill the fungus inside host plant tissues. Systemic fungicides used for seed treatment include, but are not limited to the following: azoxystrobin, carboxin, mefenoxam, metalaxyl, thiabendazole, trifloxystrobin, and various triazole fungicides, including difenoconazole, ipconazole, tebuconazole, and triticonazole. Mefenoxam and metalaxyl are primarily used to target the water mold fungi Pythium and Phytophthora. Some fungicides are preferred over others, depending on the plant species, either because of subtle differences in sensitivity of the pathogenic fungal species, or because of the differences in the fungicide distribution or sensitivity of the plants. In some examples, fungicide can be a biological control agent, such as a bacterium or fungus. Such organisms may be parasitic to the pathogenic fungi, or secrete toxins or other substances which can kill or otherwise prevent the growth of fungi. Any type of fungicide, particularly ones that are commonly used on plants, can be used.

### Control Agents

[0626] In some examples, the agricultural composition comprises a control agent, which has antibacterial properties. In one embodiment, the control agent with antibacterial properties is selected from the compounds described herein elsewhere. In another embodiment, the compound is Streptomycin, oxytetracycline, oxolinic acid, or gentamicin. Other examples of antibacterial compounds which can be used as part of a seed coating composition include those based on dichlorophene and benzylalcohol hemi formal (Proxel® from ICI or Acticide® RS from Thor Chemie and Kathon® MK 25 from Rohm & Haas) and isothiazolinone derivatives such as alkylisothiazolinones and benzisothiazolinones (Acticide® MBS from Thor Chemie).

### Growth Regulators

[0627] In some examples, a growth regulator is selected from the group consisting of: Abscisic acid, amidochlor, ancymidol, 6-benzylaminopurine, brassinolide, butralin, chlormequat (chlormequat chloride), choline chloride, cyclanilide, daminozide, dikegulac, dimethipin, 2,6-dimethylpuridine, ethephon, flumetralin, flurprimidol, fluthiacet, forchlorfenuron, gibberellic acid, inabenfide, indole-3-acetic acid, maleic hydrazide, mefluidide, mepiquat (mepiquat chloride), naphthaleneacetic acid, N-6-benzyladenine, paclobutrazol, prohexadione phosphorotrithioate, 2,3,5-tri-iodobenzoic acid, trinexapac-ethyl and uniconazole. Additional non-limiting examples of growth regulators include brassinosteroids, cytokinines (e.g., kinetin and zeatin), auxins (e.g., indolylacetic acid and indolylacetyl aspartate), flavonoids and isoflavanoids (e.g., formononetin and diosmetin), phytoaixins (e.g., glyceolline), and phytoalexin-inducing oligosaccharides (e.g., pectin, chitin, chitosan, polygalacuronic acid, and oligogalacturonic acid), and gibellerins. Such agents are ideally compatible with the agricultural seed or seedling onto which the formulation is applied (e.g., it should not be deleterious to the growth or health of the plant). Furthermore, the agent is ideally one which does not cause safety concerns for human, animal or industrial use (e.g., no safety issues, or the compound is sufficiently labile that the commodity plant product derived from the plant contains negligible amounts of the compound).

### Nutrients

[0628] Some examples of nutrients can be selected from the group consisting of a nitrogen fertilizer including, but not limited to Urea, Ammonium nitrate, Ammonium sulfate, Non-pressure nitrogen solutions, Aqua ammonia, Anhydrous ammonia, Ammonium thiosulfate, Sulfur-coated urea, Urea-formaldehydes, IBDU, Polymer-coated urea, Calcium nitrate, Ureaform, and Methylene urea, phosphorous fertilizers such as Diammonium phosphate, Monoammonium phosphate, Ammonium polyphosphate, Concentrated superphosphate and Triple superphosphate, and potassium fertilizers such as Potassium chloride, Potassium sulfate, Potassium-magnesium sulfate, Potassium nitrate.

### Pests

[0629] Agricultural compositions of the disclosure, which may be added to the recombinant plants as taught herein, are sometimes combined with one or more pesticides. These additions provide the recombinant plants taught herein with a pest free or pest reduced growing environment.

[0630] The pesticides that are combined with the recombinant plants of the disclosure may target any of the pests mentioned below.

[0631] “Pest” includes but is not limited to, insects, fungi, bacteria, nematodes, mites, ticks and the like. Insect pests include insects selected from the orders Coleoptera, Diptera, Hymenoptera, Lepidoptera, Mallophaga, Homoptera, Hemiptera Orthroptera, Thysanoptera, Dermaptera, Isoptera, Anoplura, Siphonaptera, Trichoptera, etc., particularly Lepidoptera and Coleoptera.

[0632] Exemplary chemical compositions, which may be combined with the recombinant plants of the disclosure, include: Soybean Herbicides: Alachlor, Bentazone, Trifluralin, Chlorimuron-Ethyl, Cloransulam-Methyl, Fenoxaprop, Fomesafen, Flu-azifop, Glyphosate, Imazamox, Imazaquin, Imazethapyr, (S-)Metolachlor, Metribuzin, Pendimethalin, Tepraloxydim, Glufosinate; Soybean Insecticides: Lambda-cyhalothrin, Methomyl, Parathion, Thiocarb, Imidacloprid, Clothianidin, Thiamethoxam, Thiacloprid, Acetamiprid, Dinetofuran, Flubendiamide, Rynaxypyr, Cyazypyr, Spinosad, Spinotoram, Emamectin-Benzoate, Fipronil, Ethiprole, Deltamethrin, O-Cyfluthrin, gamma and lambda Cyhalothrin, 4-[[(6-Chlorpyridin-3-yl)methyl] (2,2-difluorethyl)amino]furan-2(5H)-on, Spirotetramat, Spinodiclofen, Triflumuron, Flonicamid, Thiodicarb, beta-Cyfluthrin; Soybean Fungicides: Azoxystrobin, Cyproconazole, Epoxiconazole, Flutriafol, Pyraclostrobin, Tebuconazole, Trifloxystrobin, Prothioconazole, Tetraconazole;

### Insecticidal Compositions

[0633] As aforementioned, agricultural compositions of the disclosure, which may be added to a recombinant plant as taught herein, are sometimes combined with (or contain) one or more insecticides.

[0634] In some embodiments, insecticidal compositions may be included in the compositions set forth herein, and can be applied to a plant or a part thereof simultaneously or in succession, with other compounds. Exemplary insecticides are provided in Table 18.

TABLE 18
Exemplary insecticides associated with various modes of action, which
can be combined with the recombinant plants of the disclosure

| | | | Physiological |
|---|---|---|---|
| Mode of Action | Compound class | Exemplary insecticides | function(s) affected |
| acetylcholinesterase | carbamates | Alanycarb, Aldicarb, | Nerve and |
| (AChE) inhibitors | | Bendiocarb, Benfuracarb, | muscle |
| | | Butocarboxim, | |
| | | Butoxycarboxim, Carbaryl, | |
| | | Carbofuran, Carbosulfan, | |
| | | Ethiofencarb, Fenobucarb, | |
| | | Formetanate, Furathiocarb, | |
| | | Isoprocarb, Methiocarb, | |
| | | Methomyl, Metolcarb, | |
| | | Oxamyl, Pirimicarb, Propoxur, | |
| | | Thiodicarb, Thiofanox, | |
| | | Triazamate, Trimethacarb, | |
| | | XMC, Xylylcarb | |
| acetylcholinesterase | organophosphates | Acephate, Azamethiphos, | Nerve and |
| (AChE) inhibitors | | Azinphos-ethyl, Azinphos- | muscle |
| | | methyl, Cadusafos, | |
| | | Chlorethoxyfos, | |
| | | Chlorfenvinphos, | |
| | | Chlormephos, Chlorpyrifos, | |
| | | Chlorpyrifos-methyl, | |
| | | Coumaphos, Cyanophos, | |
| | | Demeton-S-methyl, Diazinon, | |
| | | Dichlorvos/DDVP, | |
| | | Dicrotophos, Dimethoate, | |
| | | Dimethylvinphos, Disulfoton, | |
| | | EPN, Ethion, Ethoprophos, | |
| | | Famphur, Fenamiphos, | |
| | | Fenitrothion, Fenthion, | |
| | | Fosthiazate, Heptenophos, | |
| | | Imicyafos, Isofenphos, | |
| | | Isopropyl O- | |
| | | (methoxyaminothio- | |
| | | phosphoryl) salicylate, | |
| | | Isoxathion, Malathion, | |
| | | Mecarbam, Methamidophos, | |
| | | Methidathion, Mevinphos, | |
| | | Monocrotophos, Naled, | |
| | | Omethoate, Oxydemeton- | |
| | | methyl, Parathion, Parathion- | |
| | | methyl, Phenthoate, Phorate, | |
| | | Phosalone, Phosmet, | |
| | | Phosphamidon, Phoxim, | |
| | | Pirimiphos-methyl, | |
| | | Profenofos, Propetamphos, | |
| | | Prothiofos, Pyraclofos, | |
| | | Pyridaphenthion, Quinalphos, | |
| | | Sulfotep, Tebupirimfos, | |
| | | Temephos, Terbufos, | |
| | | Tetrachlorvinphos, Thiometon, | |
| | | Triazophos, Trichlorfon, | |
| | | Vamidothion | |
| GABA-gated | cyclodiene | Chlordane, Endosulfan | Nerve and |
| chloride channel | organochlorines | | muscle |
| blockers | | | |
| GABA-gated | phenylpyrazoles | Ethiprole, Fipronil | Nerve and |
| chloride channel | (Fiproles) | | muscle |
| blockers | | | |
| sodium channel | pyrethroids, | Acrinathrin, Allethrin, | Nerve and |
| modulators | pyrethrins | Bifenthrin, Bioallethrin, | muscle |
| | | Bioallethrin S-cyclopentenyl, | |
| | | Bioresmethrin, Cycloprothrin, | |
| | | Cyfluthrin, Cyhalothrin, | |
| | | Cypermethrin, Cyphenothrin | |
| | | [(1R)-trans-isomers], | |
| | | Deltamethrin, Empenthrin | |
| | | [(EZ)-(1R)-isomers], | |
| | | Esfenvalerate, Etofenprox, | |
| | | Fenpropathrin, Fenvalerate, | |
| | | Flucythrinate, Flumethrin, | |
| | | Halfenprox, Kadathrin, | |
| | | Phenothrin [(1R)-trans- | |
| | | isomer], Prallethrin, Pyrethrins | |
| | | (pyrethrum), Resmethrin, | |
| | | Silafluofen, Tefluthrin, | |
| | | Tetramethrin, Tetramethrin | |
| | | [(1R)-isomers], Tralomethrin, | |
| | | Transfluthrin, alpha- | |
| | | Cypermethrin, beta-Cyfluthrin, | |
| | | beta-Cypermethrin, d-cis-trans | |
| | | Allethrin, d-trans Allethrin, | |
| | | gamma-Cyhalothrin, lambda- | |
| | | Cyhalothrin, tau-Fluvalinate, | |
| | | theta-Cypermethrin, zeta- | |
| | | Cypermethrin | |
| sodium channel | DDT, | DDT, | Nerve and |
| modulators | methoxychlor | methoxychlor | muscle |
| nicotinic | neonicotinoids | Acetamiprid, Clothianidin, | Nerve and |
| acetylcholine | | Dinotefuran, Imidacloprid, | muscle |
| receptor (nAChR) | | Nitenpyram, Thiacloprid, | |
| competitive | | Thiamethoxam | |
| modulators | | | |
| nicotinic | nicotine | nicotine | Nerve and |
| acetylcholine | | | muscle |
| receptor (nAChR) | | | |
| competitive | | | |
| modulators | | | |
| nicotinic | sulfoximines | sulfoxaflor | Nerve and |
| acetylcholine | | | muscle |
| receptor (nAChR) | | | |
| competitive | | | |
| modulators | | | |
| nicotinic | butenolides | Flupyradifurone | Nerve and |
| acetylcholine | | | muscle |
| receptor (nAChR) | | | |
| competitive | | | |
| modulators | | | |
| nicotinic | spinosyns | Spinetoram, Spinosad | Nerve and |
| acetylcholine | | | muscle |
| receptor (nAChR) | | | |
| allosteric | | | |
| modulators | | | |
| Glutamate-gated | avermectins, | Abamectin, Emamectin | Nerve and |
| chloride channel | milbemycins | benzoate, Lepimectin, | muscle |
| (GluCl) allosteric | | Milbemectin | |
| modulators | | | |
| juvenile hormone | juvenile hormone | Hydroprene, Kinoprene, | Growth |
| mimics | analogues | Methoprene | |
| juvenile hormone | Fenoxycarb | Fenoxycarb | Growth |
| mimics | | | |
| juvenile hormone | Pyriproxyfen | Pyriproxyfen | Growth |
| mimics | | | |
| miscellaneous non- | alkyl halides | Methyl bromide and other | Unknown or |
| specific (multi-site) | | alkyl halides | non-specific |
| inhibitors | | | |
| miscellaneous non- | Chloropicrin | Chloropicrin | Unknown or |
| specific (multi-site) | | | non-specific |
| inhibitors | | | |
| miscellaneous non- | fluorides | Cryolite, sulfuryl fluoride | Unknown or |
| specific (multi-site) | | | non-specific |
| inhibitors | | | |
| miscellaneous non- | borates | Borax, Boric acid, Disodium | Unknown or |
| specific (multi-site) | | octaborate, Sodium borate, | non-specific |
| inhibitors | | Sodium metaborate | |
| miscellaneous non- | tartar emetic | tartar emetic | Unknown or |
| specific (multi-site) | | | non-specific |
| inhibitors | | | |
| miscellaneous non- | methyl | Dazomet, Metam | Unknown or |
| specific (multi-site) | isothiocyanate | | non-specific |
| inhibitors | generators | | |
| modulators of | Pyridine | Pymetrozine, Pyrifluquinazon | Nerve and |
| chordotonal organs | azomethine | | muscle |
| | derivatives | | |
| mite growth | Clofentezine, | Clofentezine, | Growth |
| inhibitors | Diflovidazin, | Diflovidazin, | |
| | Hexythiazox | Hexythiazox | |
| mite growth | Etoxazole | Etoxazole | Growth |
| inhibitors | | | |
| microbial | Bacillus | Bt var. aizawai, Bt var. | Midgut |
| disruptors of insect | thuringiensis and | israelensis, Bt var. kurstaki, Bt | |
| midgut membranes | the insecticidal | var. tenebrionensis | |
| | proteins they | | |
| | produce | | |
| microbial | Bacillus | Bacillus | Midgut |
| disruptors of insect | sphaericus | sphaericus | |
| midgut membranes | | | |
| inhibitors of | Diafenthiuron | Diafenthiuron | Respiration |
| mitochondrial ATP | | | |
| synthase | | | |
| inhibitors of | organotin | Azocyclotin, Cyhexatin, | Respiration |
| mitochondrial ATP | miticides | Fenbutatin oxide | |
| synthase | | | |
| inhibitors of | Propargite | Propargite | Respiration |
| mitochondrial ATP | | | |
| synthase | | | |
| inhibitors of | Tetradifon | Tetradifon | Respiration |
| mitochondrial ATP | | | |
| synthase | | | |
| uncouplers of | Chlorfenapyr, | Chlorfenapyr, | Respiration |
| oxidative | DNOC, | DNOC, | |
| phosphorylation via | Sulfuramid | Sulfuramid | |
| disruption of the | | | |
| proton gradient | | | |
| Nicotinic | nereistoxin | Bensultap, Cartap | Nerve and |
| acetylcholine | analogues | hydrochloride, Thiocyclam, | muscle |
| receptor (nAChR) | | Thiosultap-sodium | |
| channel blockers | | | |
| inhibitors of chitin | benzoylureas | Bistrifluron, Chlorfluazuron, | Growth |
| biosynthesis, type 0 | | Diflubenzuron, Flucycloxuron, | |
| | | Flufenoxuron, Hexaflumuron, | |
| | | Lufenuron, Novaluron, | |
| | | Noviflumuron, Teflubenzuron, | |
| | | Triflumuron | |
| inhibitors of chitin | Buprofezin | Buprofezin | Growth |
| biosynthesis, type 1 | | | |
| moulting disruptor, | Cyromazine | Cyromazine | Growth |
| Dipteran | | | |
| ecdysone receptor | diacylhydrazines | Chromafenozide, | Growth |
| agonists | | Halofenozide, | |
| | | Methoxyfenozide, | |
| | | Tebufenozide | |
| octopamine | Amitraz | Amitraz | Nerve and |
| receptor agonists | | | muscle |
| mitochondrial | Hydramethylnon | Hydramethylnon | Respiration |
| complex III | | | |
| electron transport | | | |
| inhibitors | | | |
| mitochondrial | Acequinocyl | Acequinocyl | Respiration |
| complex III | | | |
| electron transport | | | |
| inhibitors | | | |
| mitochondrial | Fluacrypyrim | Fluacrypyrim | Respiration |
| complex III | | | |
| electron transport | | | |
| inhibitors | | | |
| mitochondrial | Bifenazate | Bifenazate | Respiration |
| complex III | | | |
| electron transport | | | |
| inhibitors | | | |
| mitochondrial | Meti acaricides | Fenazaquin, Fenpyroximate, | Respiration |
| complex I electron | and insecticides | Pyridaben, Pyrimidifen, | |
| transport inhibitors | | Tebufenpyrad, Tolfenpyrad | |
| mitochondrial | Rotenone | Rotenone | Respiration |
| complex I electron | | | |
| transport inhibitors | | | |
| voltage-dependent | oxadiazines | Indoxacarb | Nerve and |
| sodium channel | | | muscle |
| blockers | | | |
| voltage-dependent | semicarbazones | Metaflumizone | Nerve and |
| sodium channel | | | muscle |
| blockers | | | |
| inhibitors of acetyl | tetronic and | Spirodiclofen, Spiromesifen, | Growth |
| CoA carboxylase | tetramic acid | Spirotetramat | |
| | derivatives | | |
| mitochondrial | phosphides | Aluminium phosphide, | Respiration |
| complex IV | | Calcium phosphide, | |
| electron transport | | Phosphine, Zinc phosphide | |
| inhibitors | | | |
| mitochondrial | cyanides | Calcium cyanide, Potassium | Respiration |
| complex IV | | cyanide, Sodium cyanide | |
| electron transport | | | |
| inhibitors | | | |
| mitochondrial | beta-ketonitrile | Cyenopyrafen, Cyflumetofen | Respiration |
| complex II electron | derivatives | | |
| transport inhibitors | | | |
| mitochondrial | carboxanilides | Pyflubumide | Respiration |
| complex II electron | | | |
| transport inhibitors | | | |
| ryanodine receptor | diamides | Chlorantraniliprole, | Nerve and |
| modulators | | Cyantraniliprole, | muscle |
| | | Flubendiamide | |
| Chordotonal organ | Flonicamid | Flonicamid | Nerve and |
| modulators - | | | muscle |
| undefined target | | | |
| site | | | |
| compounds of | Azadirachtin | Azadirachtin | Unknown |
| unknown or | | | |
| uncertain mode of | | | |
| action | | | |
| compounds of | Benzoximate | Benzoximate | Unknown |
| unknown or | | | |
| uncertain mode of | | | |
| action | | | |
| compounds of | Bromopropylate | Bromopropylate | Unknown |
| unknown or | | | |
| uncertain mode of | | | |
| action | | | |
| compounds of | Chinomethionat | Chinomethionat | Unknown |
| unknown or | | | |
| uncertain mode of | | | |
| action | | | |
| compounds of | Dicofol | Dicofol | Unknown |
| unknown or | | | |
| uncertain mode of | | | |
| action | | | |
| compounds of | lime sulfur | lime sulfur | Unknown |
| unknown or | | | |
| uncertain mode of | | | |
| action | | | |
| compounds of | Pyridalyl | Pyridalyl | Unknown |
| unknown or | | | |
| uncertain mode of | | | |
| action | | | |
| compounds of | sulfur | sulfur | Unknown |
| unknown or | | | |
| uncertain mode of | | | |
| action | | | |

TABLE 19
Exemplary list of pesticides, which can be combined
with the recombinant plants of the disclosure

| Category | Compounds |
|---|---|
| INSECTICIDES | |
| arsenical insecticides | calcium arsenate |
| | copper acetoarsenite |
| | copper arsenate |
| | lead arsenate |
| | potassium arsenite |
| | sodium arsenite |
| botanical insecticides | allicin |
| | anabasine |
| | azadirachtin |
| | carvacrol |
| | d-limonene |
| | matrine |
| | nicotine |
| | nornicotine |
| | oxymatrine |
| | pyrethrins |
| | cinerins |
| | cinerin I |
| | cinerin II |
| | jasmolin I |
| | jasmolin II |
| | pyrethrin I |
| | pyrethrin II |
| | quassia |
| | rhodojaponin-III |
| | rotenone |
| | ryania |
| | sabadilla |
| | sanguinarine |
| | triptolide |
| carbamate insecticides | bendiocarb |
| | carbaryl |
| benzofuranyl methylcarbamate | benfuracarb |
| insecticides | carbofuran |
| | carbosulfan |
| | decarbofuran |
| | furathiocarb |
| dimethylcarbamate insecticides | dimetan |
| | dimetilan |
| | hyquincarb |
| | isolan |
| | pirimicarb |
| | pyramat |
| | pyrolan |
| oxime carbamate insecticides | alanycarb |
| | aldicarb |
| | aldoxycarb |
| | butocarboxim |
| | butoxycarboxim |
| | methomyl |
| | nitrilacarb |
| | oxamyl |
| | tazimcarb |
| | thiocarboxime |
| | thiodicarb |
| | thiofanox |
| phenyl methylcarbamate insecticides | allyxycarb |
| | aminocarb |
| | bufencarb |
| | butacarb |
| | carbanolate |
| | cloethocarb |
| | CPMC |
| | dicresyl |
| | dimethacarb |
| | dioxacarb |
| | EMPC |
| | ethiofencarb |
| | fenethacarb |
| | fenobucarb |
| | isoprocarb |
| | methiocarb |
| | metolcarb |
| | mexacarbate |
| | promacyl |
| | promecarb |
| | propoxur |
| | trimethacarb |
| | XMC |
| | xylylcarb |
| diamide insecticides | broflanilide |
| | chlorantraniliprole |
| | cyantraniliprole |
| | cyclaniliprole |
| | cyhalodiamide |
| | flubendiamide |
| | tetraniliprole |
| dinitrophenol insecticides | dinex |
| | dinoprop |
| | dinosam |
| | DNOC |
| fluorine insecticides | barium hexafluorosilicate |
| | cryolite |
| | flursulamid |
| | sodium fluoride |
| | sodium hexafluorosilicate |
| | sulfluramid |
| formamidine insecticides | amitraz |
| | chlordimeform |
| | formetanate |
| | formparanate |
| | medimeform |
| | semiamitraz |
| fumigant insecticides | acrylonitrile |
| | carbon disulfide |
| | carbon tetrachloride |
| | carbonyl sulfide |
| | chloroform |
| | chloropicrin |
| | cyanogen |
| | para-dichlorobenzene |
| | 1,2-dichloropropane |
| | dithioether |
| | ethyl formate |
| | ethylene dibromide |
| | ethylene dichloride |
| | ethylene oxide |
| | hydrogen cyanide |
| | methyl bromide |
| | methyl iodide |
| | methylchloroform |
| | methylene chloride |
| | naphthalene |
| | phosphine |
| | sodium tetrathiocarbonate |
| | sulfuryl fluoride |
| | tetrachloroethane |
| inorganic insecticides | borax |
| | boric acid |
| | calcium polysulfide |
| | copper oleate |
| | diatomaceous earth |
| | mercurous chloride |
| | potassium thiocyanate |
| | silica gel |
| | sodium thiocyanate |
| insect growth regulators | |
| chitin synthesis inhibitors | buprofezin |
| | cyromazine |
| benzoylphenylurea chitin synthesis | bistrifluron |
| inhibitors | chlorbenzuron |
| | chlorfluazuron |
| | dichlorbenzuron |
| | diflubenzuron |
| | flucycloxuron |
| | flufenoxuron |
| | hexaflumuron |
| | lufenuron |
| | novaluron |
| | noviflumuron |
| | penfluron |
| | teflubenzuron |
| | triflumuron |
| juvenile hormone mimics | dayoutong |
| | epofenonane |
| | fenoxycarb |
| | hydroprene |
| | kinoprene |
| | methoprene |
| | pyriproxyfen |
| | triprene |
| juvenile hormones | juvenile hormone I |
| | juvenile hormone II |
| | juvenile hormone III |
| moulting hormone agonists | chromafenozide |
| | furan tebufenozide |
| | halofenozide |
| | methoxyfenozide |
| | tebufenozide |
| | yishijing |
| moulting hormones | α-ecdysone |
| | ecdysterone |
| moulting inhibitors | diofenolan |
| precocenes | precocene I |
| | precocene II |
| | precocene III |
| unclassified insect growth regulators | dicyclanil |
| macrocyclic lactone insecticides | |
| avermectin insecticides | abamectin |
| | doramectin |
| | emamectin |
| | eprinomectin |
| | ivermectin |
| | selamectin |
| milbemycin insecticides | lepimectin |
| | milbemectin |
| | milbemycin oxime |
| | moxidectin |
| spinosyn insecticides | spinetoram |
| | spinosad |
| neonicotinoid insecticides | |
| nitroguanidine neonicotinoid insecticides | clothianidin |
| | dinotefuran |
| | imidacloprid |
| | imidaclothiz |
| | thiamethoxam |
| nitromethylene neonicotinoid insecticides | nitenpyram |
| | nithiazine |
| pyridylmethylamine neonicotinoid | acetamiprid |
| insecticides | imidacloprid |
| | nitenpyram |
| | paichongding |
| | thiacloprid |
| nereistoxin analogue insecticides | bensultap |
| | cartap |
| | polythialan |
| | thiocyclam |
| | thiosultap |
| organochlorine insecticides | bromo-DDT |
| | camphechlor |
| | DDT |
| | pp′-DDT |
| | ethyl-DDD |
| | HCH |
| | gamma-HCH |
| | lindane |
| | methoxychlor |
| | pentachlorophenol |
| | TDE |
| cyclodiene insecticides | aldrin |
| | bromocyclen |
| | chlorbicyclen |
| | chlordane |
| | chlordecone |
| | dieldrin |
| | dilor |
| | endosulfan |
| | alpha-endosulfan |
| | endrin |
| | HEOD |
| | heptachlor |
| | HHDN |
| | isobenzan |
| | isodrin |
| | kelevan |
| | mirex |
| organophosphorus insecticides | |
| organophosphate insecticides | bromfenvinfos |
| | calvinphos |
| | chlorfenvinphos |
| | crotoxyphos |
| | dichlorvos |
| | dicrotophos |
| | dimethylvinphos |
| | fospirate |
| | heptenophos |
| | methocrotophos |
| | mevinphos |
| | monocrotophos |
| | naled |
| | naftalofos |
| | phosphamidon |
| | propaphos |
| | TEPP |
| | tetrachlorvinphos |
| organothiophosphate insecticides | dioxabenzofos |
| | fosmethilan |
| | phenthoate |
| aliphatic organothiophosphate | acethion |
| insecticides | acetophos |
| | amiton |
| | cadusafos |
| | chlorethoxyfos |
| | chlormephos |
| | demephion |
| | demephion-O |
| | demephion-S |
| | demeton |
| | demeton-O |
| | demeton-S |
| | demeton-methyl |
| | demeton-O-methyl |
| | demeton-S-methyl |
| | demeton-S-methylsulphon |
| | disulfoton |
| | ethion |
| | ethoprophos |
| | IPSP |
| | isothioate |
| | malathion |
| | methacrifos |
| | methylacetophos |
| | oxydemeton-methyl |
| | oxydeprofos |
| | oxydisulfoton |
| | phorate |
| | sulfotep |
| | terbufos |
| | thiometon |
| aliphatic amide organothiophosphate | amidithion |
| insecticides | cyanthoate |
| | dimethoate |
| | ethoate-methyl |
| | formothion |
| | mecarbam |
| | omethoate |
| | prothoate |
| | sophamide |
| | vamidothion |
| oxime organothiophosphate insecticides | chlorphoxim |
| | phoxim |
| | phoxim-methyl |
| heterocyclic organothiophosphate | azamethiphos |
| insecticides | colophonate |
| | coumaphos |
| | coumithoate |
| | dioxathion |
| | endothion |
| | menazon |
| | morphothion |
| | phosalone |
| | pyraclofos |
| | pyrazothion |
| | pyridaphenthion |
| | quinothion |
| benzothiopyran organothiophosphate | dithicrofos |
| insecticides | thicrofos |
| benzotriazine organothiophosphate | azinphos-ethyl |
| insecticides | azinphos-methyl |
| isoindole organothiophosphate | dialifos |
| insecticides | phosmet |
| isoxazole organothiophosphate | isoxathion |
| insecticides | zolaprofos |
| pyrazolopyrimidine organothiophosphate | chlorprazophos |
| insecticides | pyrazophos |
| pyridine organothiophosphate | chlorpyrifos |
| insecticides | chlorpyrifos-methyl |
| pyrimidine organothiophosphate | butathiofos |
| insecticides | diazinon |
| | etrimfos |
| | lirimfos |
| | pirimioxyphos |
| | pirimiphos-ethyl |
| | pirimiphos-methyl |
| | primidophos |
| | pyrimitate |
| | tebupirimfos |
| quinoxaline organothiophosphate | quinalphos |
| insecticides | quinalphos-methyl |
| thiadiazole organothiophosphate | athidathion |
| insecticides | lythidathion |
| | methidathion |
| | prothidathion |
| triazole organothiophosphate insecticides | isazofos |
| | triazophos |
| phenyl organothiophosphate insecticides | azothoate |
| | bromophos |
| | bromophos-ethyl |
| | carbophenothion |
| | chlorthiophos |
| | cyanophos |
| | cythioate |
| | dicapthon |
| | dichlofenthion |
| | etaphos |
| | famphur |
| | fenchlorphos |
| | fenitrothion |
| | fensulfothion |
| | fenthion |
| | fenthion-ethyl |
| | heterophos |
| | jodfenphos |
| | mesulfenfos |
| | parathion |
| | parathion-methyl |
| | phenkapton |
| | phosnichlor |
| | profenofos |
| | prothiofos |
| | sulprofos |
| | temephos |
| | trichlormetaphos-3 |
| | trifenofos |
| | xiaochongliulin |
| phosphonate insecticides | butonate |
| | trichlorfon |
| phosphonothioate insecticides | mecarphon |
| phenyl ethylphosphonothioate | fonofos |
| insecticides | trichloronat |
| phenyl phenylphosphonothioate | cyanofenphos |
| insecticides | EPN |
| | leptophos |
| phosphoramidate insecticides | crufomate |
| | fenamiphos |
| | fosthietan |
| | mephosfolan |
| | phosfolan |
| | phosfolan-methyl |
| | pirimetaphos |
| phosphoramidothioate insecticides | acephate |
| | chloramine phosphorus |
| | isocarbophos |
| | isofenphos |
| | isofenphos-methyl |
| | methamidophos |
| | phosglycin |
| | propetamphos |
| phosphorodiamide insecticides | dimefox |
| | mazidox |
| | mipafox |
| | schradan |
| oxadiazine insecticides | indoxacarb |
| oxadiazolone insecticides | metoxadiazone |
| phthalimide insecticides | dialifos |
| | phosmet |
| | tetramethrin |
| physical insecticides | maltodextrin |
| desiccant insecticides | boric acid |
| | diatomaceous earth |
| | silica gel |
| pyrazole insecticides | chlorantraniliprole |
| | cyantraniliprole |
| | cyclaniliprole |
| | dimetilan |
| | isolan |
| | tebufenpyrad |
| | tetraniliprole |
| | tolfenpyrad |
| phenylpyrazole insecticides | acetoprole |
| | ethiprole |
| | fipronil |
| | flufiprole |
| | pyraclofos |
| | pyrafluprole |
| | pyriprole |
| | pyrolan |
| | vaniliprole |
| pyrethroid insecticides | |
| pyrethroid ester insecticides | acrinathrin |
| | allethrin |
| | bioallethrin |
| | esdépalléthrine |
| | barthrin |
| | bifenthrin |
| | kappa-bifenthrin |
| | bioethanomethrin |
| | brofenvalerate |
| | brofluthrinate |
| | bromethrin |
| | butethrin |
| | chlorempenthrin |
| | cyclethrin |
| | cycloprothrin |
| | cyfluthrin |
| | beta-cyfluthrin |
| | cyhalothrin |
| | gamma-cyhalothrin |
| | lambda-cyhalothrin |
| | cypermethrin |
| | alpha-cypermethrin |
| | beta-cypermethrin |
| | theta-cypermethrin |
| | zeta-cypermethrin |
| | cyphenothrin |
| | deltamethrin |
| | dimefluthrin |
| | dimethrin |
| | empenthrin |
| | d-fanshiluquebingjuzhi |
| | chloroprallethrin |
| | fenfluthrin |
| | fenpirithrin |
| | fenpropathrin |
| | fenvalerate |
| | esfenvalerate |
| | flucythrinate |
| | fluvalinate |
| | tau-fluvalinate |
| | furamethrin |
| | furethrin |
| | heptafluthrin |
| | imiprothrin |
| | japothrins |
| | kadethrin |
| | methothrin |
| | metofluthrin |
| | epsilon-metofluthrin |
| | momfluorothrin |
| | epsilon-momfluorothrin |
| | pentmethrin |
| | permethrin |
| | biopermethrin |
| | transpermethrin |
| | phenothrin |
| | prallethrin |
| | profluthrin |
| | proparthrin |
| | pyresmethrin |
| | renofluthrin |
| | meperfluthrin |
| | resmethrin |
| | bioresmethrin |
| | cismethrin |
| | tefluthrin |
| | kappa-tefluthrin |
| | terallethrin |
| | tetramethrin |
| | tetramethylfluthrin |
| | tralocythrin |
| | tralomethrin |
| | transfluthrin |
| | valerate |
| pyrethroid ether insecticides | etofenprox |
| | flufenprox |
| | halfenprox |
| | protrifenbute |
| | silafluofen |
| pyrethroid oxime insecticides | sulfoxime |
| | thiofluoximate |
| pyrimidinamine insecticides | flufenerim |
| | pyrimidifen |
| pyrrole insecticides | chlorfenapyr |
| quaternary ammonium insecticides | sanguinarine |
| sulfoximine insecticides | sulfoxaflor |
| tetramic acid insecticides | spirotetramat |
| tetronic acid insecticides | spiromesifen |
| thiazole insecticides | clothianidin |
| | imidaclothiz |
| | thiamethoxam |
| | thiapronil |
| thiazolidine insecticides | tazimcarb |
| | thiacloprid |
| thiourea insecticides | diafenthiuron |
| urea insecticides | flucofuron |
| | sulcofuron |
| zwitterionic insecticides | dicloromezotiaz |
| | triflumezopyrim |
| unclassified insecticides | afidopyropen |
| | afoxolaner |
| | allosamidin |
| | closantel |
| | copper naphthenate |
| | crotamiton |
| | EXD |
| | fenazaflor |
| | fenoxacrim |
| | flometoquin |
| | flonicamid |
| | fluhexafon |
| | flupyradifurone |
| | fluralaner |
| | fluxametamide |
| | hydramethylnon |
| | isoprothiolane |
| | jiahuangchongzong |
| | malonoben |
| | metaflumizone |
| | nifluridide |
| | plifenate |
| | pyridaben |
| | pyridalyl |
| | pyrifluquinazon |
| | rafoxanide |
| | thuringiensin |
| | triarathene |
| | triazamate |
| ACARICIDES | |
| botanical acaricides | carvacrol |
| | sanguinarine |
| bridged diphenyl acaricides | azobenzene |
| | benzoximate |
| | benzyl benzoate |
| | bromopropylate |
| | chlorbenside |
| | chlorfenethol |
| | chlorfenson |
| | chlorfensulphide |
| | chlorobenzilate |
| | chloropropylate |
| | cyflumetofen |
| | DDT |
| | dicofol |
| | diphenyl sulfone |
| | dofenapyn |
| | fenson |
| | fentrifanil |
| | fluorbenside |
| | genit |
| | hexachlorophene |
| | phenproxide |
| | proclonol |
| | tetradifon |
| | tetrasul |
| carbamate acaricides | benomyl |
| | carbanolate |
| | carbaryl |
| | carbofuran |
| | methiocarb |
| | metolcarb |
| | promacyl |
| | propoxur |
| oxime carbamate acaricides | aldicarb |
| | butocarboxim |
| | oxamyl |
| | thiocarboxime |
| | thiofanox |
| carbazate acaricides | bifenazate |
| dinitrophenol acaricides | binapacryl |
| | dinex |
| | dinobuton |
| | dinocap |
| | dinocap-4 |
| | dinocap-6 |
| | dinocton |
| | dinopenton |
| | dinosulfon |
| | dinoterbon |
| | DNOC |
| formamidine acaricides | amitraz |
| | chlordimeform |
| | chloromebuform |
| | formetanate |
| | formparanate |
| | medimeform |
| | semiamitraz |
| macrocyclic lactone acaricides | tetranactin |
| avermectin acaricides | abamectin |
| | doramectin |
| | eprinomectin |
| | ivermectin |
| | selamectin |
| milbemycin acaricides | milbemectin |
| | milbemycin oxime |
| | moxidectin |
| mite growth regulators | clofentezine |
| | cyromazine |
| | diflovidazin |
| | dofenapyn |
| | fluazuron |
| | flubenzimine |
| | flucycloxuron |
| | flufenoxuron |
| | hexythiazox |
| organochlorine acaricides | bromocyclen |
| | camphechlor |
| | DDT |
| | dienochlor |
| | endosulfan |
| | lindane |
| organophosphorus acaricides | |
| organophosphate acaricides | chlorfenvinphos |
| | crotoxyphos |
| | dichlorvos |
| | heptenophos |
| | mevinphos |
| | monocrotophos |
| | naled |
| | TEPP |
| | tetrachlorvinphos |
| organothiophosphate acaricides | amidithion |
| | amiton |
| | azinphos-ethyl |
| | azinphos-methyl |
| | azothoate |
| | benoxafos |
| | bromophos |
| | bromophos-ethyl |
| | carbophenothion |
| | chlorpyrifos |
| | chlorthiophos |
| | coumaphos |
| | cyanthoate |
| | demeton |
| | demeton-O |
| | demeton-S |
| | demeton-methyl |
| | demeton-O-methyl |
| | demeton-S-methyl |
| | demeton-S-methylsulphon |
| | dialifos |
| | diazinon |
| | dimethoate |
| | dioxathion |
| | disulfoton |
| | endothion |
| | ethion |
| | ethoate-methyl |
| | formothion |
| | malathion |
| | mecarbam |
| | methacrifos |
| | omethoate |
| | oxydeprofos |
| | oxydisulfoton |
| | parathion |
| | phenkapton |
| | phorate |
| | phosalone |
| | phosmet |
| | phostin |
| | phoxim |
| | pirimiphos-methyl |
| | prothidathion |
| | prothoate |
| | pyrimitate |
| | quinalphos |
| | quintiofos |
| | sophamide |
| | sulfotep |
| | thiometon |
| | triazophos |
| | trifenofos |
| | vamidothion |
| phosphonate acaricides | trichlorfon |
| phosphoramidothioate acaricides | isocarbophos |
| | methamidophos |
| | propetamphos |
| phosphorodiamide acaricides | dimefox |
| | mipafox |
| | schradan |
| organotin acaricides | azocyclotin |
| | cyhexatin |
| | fenbutatin oxide |
| | phostin |
| phenylsulfamide acaricides | dichlofluanid |
| phthalimide acaricides | dialifos |
| | phosmet |
| pyrazole acaricides | cyenopyrafen |
| | fenpyroximate |
| | pyflubumide |
| | tebufenpyrad |
| phenylpyrazole acaricides | acetoprole |
| | fipronil |
| | vaniliprole |
| pyrethroid acaricides | |
| pyrethroid ester acaricides | acrinathrin |
| | bifenthrin |
| | brofluthrinate |
| | cyhalothrin |
| | cypermethrin |
| | alpha-cypermethrin |
| | fenpropathrin |
| | fenvalerate |
| | flucythrinate |
| | flumethrin |
| | fluvalinate |
| | tau-fluvalinate |
| | permethrin |
| pyrethroid ether acaricides | halfenprox |
| pyrimidinamine acaricides | pyrimidifen |
| pyrrole acaricides | chlorfenapyr |
| quaternary ammonium acaricides | sanguinarine |
| quinoxaline acaricides | chinomethionat |
| | thioquinox |
| strobilurin acaricides | |
| methoxyacrylate strobilurin acaricides | bifujunzhi |
| | fluacrypyrim |
| | flufenoxystrobin |
| | pyriminostrobin |
| sulfite ester acaricides | aramite |
| | propargite |
| tetronic acid acaricides | spirodiclofen |
| tetrazine acaricides | clofentezine |
| | diflovidazin |
| thiazolidine acaricides | flubenzimine |
| | hexythiazox |
| thiocarbamate acaricides | fenothiocarb |
| thiourea acaricides | chloromethiuron |
| | diafenthiuron |
| unclassified acaricides | acequinocyl |
| | afoxolaner |
| | amidoflumet |
| | arsenous oxide |
| | clenpirin |
| | closantel |
| | crotamiton |
| | cycloprate |
| | cymiazole |
| | disulfiram |
| | etoxazole |
| | fenazaflor |
| | fenazaquin |
| | fluenetil |
| | fluralaner |
| | mesulfen |
| | MNAF |
| | nifluridide |
| | nikkomycins |
| | pyridaben |
| | sulfiram |
| | sulfluramid |
| | sulfur |
| | thuringiensin |
| | triarathene |
| CHEMOSTERILANTS | |
| | apholate |
| | bisazir |
| | busulfan |
| | diflubenzuron |
| | dimatif |
| | hemel |
| | hempa |
| | metepa |
| | methiotepa |
| | methyl apholate |
| | morzid |
| | penfluron |
| | tepa |
| | thiohempa |
| | thiotepa |
| | tretamine |
| | uredepa |
| INSECT REPELLENTS | |
| | acrep |
| | butopyronoxyl |
| | camphor |
| | d-camphor |
| | carboxide |
| | dibutyl phthalate |
| | diethyltoluamide |
| | dimethyl carbate |
| | dimethyl phthalate |
| | dibutyl succinate |
| | ethohexadiol |
| | hexamide |
| | icaridin |
| | methoquin-butyl |
| | methylneodecanamide |
| | 2-(octylthio)ethanol |
| | oxamate |
| | quwenzhi |
| | quyingding |
| | rebemide |
| | zengxiaoan |
| NEMATICIDES | |
| avermectin nematicides | abamectin |
| botanical nematicides | carvacrol |
| carbamate nematicides | benomyl |
| | carbofuran |
| | carbosulfan |
| | cloethocarb |
| oxime carbamate nematicides | alanycarb |
| | aldicarb |
| | aldoxycarb |
| | oxamyl |
| | tirpate |
| fumigant nematicides | carbon disulfide |
| | cyanogen |
| | 1,2-dichloropropane |
| | 1,3-dichloropropene |
| | dithioether |
| | methyl bromide |
| | methyl iodide |
| | sodium tetrathiocarbonate |
| organophosphorus nematicides | |
| organophosphate nematicides | diamidafos |
| | fenamiphos |
| | fosthietan |
| | phosphamidon |
| organothiophosphate nematicides | cadusafos |
| | chlorpyrifos |
| | dichlofenthion |
| | dimethoate |
| | ethoprophos |
| | fensulfothion |
| | fosthiazate |
| | heterophos |
| | isamidofos |
| | isazofos |
| | phorate |
| | phosphocarb |
| | terbufos |
| | thionazin |
| | triazophos |
| phosphonothioate nematicides | imicyafos |
| | mecarphon |
| unclassified nematicides | acetoprole |
| | benclothiaz |
| | chloropicrin |
| | dazomet |
| | DBCP |
| | DCIP |
| | fluazaindolizine |
| | fluensulfone |
| | furfural |
| | metam |
| | methyl isothiocyanate |
| | tioxazafen |
| | xylenols |

### Biorational Pesticides

[0635] Insecticides can be biorational or can also be known as biopesticides or biological pesticides. Biorational refers to any substance of natural origin (or man-made substances resembling those of natural origin) that has a detrimental or lethal effect on specific target pest(s), e.g., insects, weeds, plant diseases (including nematodes), and vertebrate pests, possess a unique mode of action, are non-toxic to man, domestic plants and animals, and have little or no adverse effects on wildlife and the environment.

[0636] Biorational insecticides (or biopesticides or biological pesticides) can be grouped as: (1) biochemicals (hormones, enzymes, pheromones and natural agents, such as insect and plant growth regulators), (2) microbial (viruses, bacteria, fungi, protozoa, and nematodes), or (3) Plant-Incorporated protectants (PIPs)—primarily transgenic plants, e.g., Bt soybean, including MON 87701 soybean.

[0637] Biopesticides, or biological pesticides, can broadly include agents manufactured from living microorganisms or a natural product and sold for the control of plant pests. Biopesticides can be: microorganisms, biochemicals, and semiochemicals. Biopesticides can also include peptides, proteins and nucleic acids such as double-stranded DNA, single-stranded DNA, double-stranded RNA, single-stranded RNA and hairpin DNA or RNA.

[0638] Bacteria, fungi, oomycetes, viruses and protozoa are all used for the biological control of insect pests. The most widely used microbial biopesticide is the insect pathogenic bacteria Bacillus thuringiensis (Bt), which produces a protein crystal (the Bt 6-endotoxin) during bacterial spore formation that is capable of causing lysis of gut cells when consumed by susceptible insects. Microbial Bt biopesticides consist of bacterial spores and 6-endotoxin crystals mass-produced in fermentation tanks and formulated as a sprayable product. Bt does not harm vertebrates and is safe to people, beneficial organisms and the environment. Thus, Bt sprays are a growing tactic for pest management on fruit and vegetable crops where their high level of selectivity and safety are considered desirable, and where resistance to synthetic chemical insecticides is a problem. Bt sprays have also been used on commodity crops such as maize, soybean and cotton, but with the advent of genetic modification of plants, farmers are increasingly growing Bt transgenic crop varieties.

[0639] Other microbial insecticides include products based on entomopathogenic baculoviruses. Baculoviruses that are pathogenic to arthropods belong to the virus family and possess large circular, covalently closed, and double-stranded DNA genomes that are packaged into nucleocapsids. More than 700 baculoviruses have been identified from insects of the orders Lepidoptera, Hymenoptera, and Diptera. Baculoviruses are usually highly specific to their host insects and thus, are safe to the environment, humans, other plants, and beneficial organisms. Over 50 baculovirus products have been used to control different insect pests worldwide.

[0640] At least 170 different biopesticide products based on entomopathogenic fungi have been developed for use against at least five insect and acarine orders in glasshouse crops, fruit and field vegetables as well as commodity crops. The majority of products are based on the ascomycetes Beauveria bassiana or Metarhizium anisopliae.

[0641] Plants produce a wide variety of secondary metabolites that deter herbivores from feeding on them. Some of these can be used as biopesticides. They include, for example, pyrethrins, which are fast-acting insecticidal compounds produced by Chrysanthemum cinerariaefolium. They have low mammalian toxicity but degrade rapidly after application. This short persistence prompted the development of synthetic pyrethrins (pyrethroids). The most widely used botanical compound is neem oil, an insecticidal chemical extracted from seeds of Azadirachta indica. Two highly active pesticides are available based on secondary metabolites synthesized by soil actinomycetes, but they have been evaluated by regulatory authorities as if they were synthetic chemical pesticides. Spinosad is a mixture of two macrolide compounds from Saccharopolyspora spinosa. It has a very low mammalian toxicity and residues degrade rapidly in the field. Farmers and growers used it widely following its introduction in 1997 but resistance has already developed in some important pests such as western flower thrips. Abamectin is a macrocyclic lactone compound produced by Streptomyces avermitilis. It is active against a range of pest species but resistance has developed to it also, for example, in tetranychid mites.

[0642] A semiochemical is a chemical signal produced by one organism that causes a behavioral change in an individual of the same or a different species. The most widely used semiochemicals for crop protection are insect sex pheromones, some of which can now be synthesized and are used for monitoring or pest control by mass trapping, lure-and-kill systems and mating disruption.

[0643] As used herein, “transgenic insecticidal trait” refers to a trait exhibited by a plant that has been genetically engineered to express a nucleic acid or polypeptide that is detrimental to one or more pests. In one embodiment, the plants of the present disclosure are resistant to attack and/or infestation from any one or more of the pests of the present disclosure. In one embodiment, the trait comprises the expression of vegetative insecticidal proteins (VIPs) from Bacillus thuringiensis, lectins and proteinase inhibitors from plants, terpenoids, cholesterol oxidases from Streptomyces spp., insect chitinases and fungal chitinolytic enzymes, bacterial insecticidal proteins and early recognition resistance genes. In another embodiment, the trait comprises the expression of a Bacillus thuringiensis protein that is toxic to a pest. In one embodiment, the Bt protein is a Cry protein (crystal protein). Bt crops include Bt corn, Bt cotton and Bt soy. Bt toxins can be from the Cry family (see, for example, Crickmore et al., 1998, Microbiol. Mol. Biol. Rev. 62: 807-812), which are particularly effective against Lepidoptera, Coleoptera and Diptera.

[0644] Bt Cry and Cyt toxins belong to a class of bacterial toxins known as pore-forming toxins (PFT) that are secreted as water-soluble proteins undergoing conformational changes in order to insert into, or to translocate across, cell membranes of their host. There are two main groups of PFT: (i) the α-helical toxins, in which α-helix regions form the trans-membrane pore, and (ii) the β-barrel toxins, that insert into the membrane by forming a β-barrel composed of Psheet hairpins from each monomer. See, Parker M W, Feil S C, “Pore-forming protein toxins: from structure to function,” Prog. Biophys. Mol. Biol. 2005 May; 88(1):91-142. The first class of PFT includes toxins such as the colicins, exotoxin A, diphtheria toxin and also the Cry three-domain toxins. On the other hand, aerolysin, α-hemolysin, anthrax protective antigen, cholesterol-dependent toxins as the perfringolysin O and the Cyt toxins belong to the β-barrel toxins. Id. In general, PFT producing-bacteria secrete their toxins and these toxins interact with specific receptors located on the host cell surface. In most cases, PFT are activated by host proteases after receptor binding inducing the formation of an oligomeric structure that is insertion competent. Finally, membrane insertion is triggered, in most cases, by a decrease in pH that induces a molten globule state of the protein. Id.

[0645] The development of transgenic crops that produce Bt Cry proteins has allowed the substitution of chemical insecticides by environmentally friendly alternatives. In transgenic plants the Cry toxin is produced continuously, protecting the toxin from degradation and making it reachable to chewing and boring insects. Cry protein production in plants has been improved by engineering cry genes with a plant biased codon usage, by removal of putative splicing signal sequences and deletion of the carboxy-terminal region of the protoxin. See, Schuler T H, et al., “Insect-resistant transgenic plants,” Trends Biotechnol. 1998; 16:168-175. The use of insect resistant crops has diminished considerably the use of chemical pesticides in areas where these transgenic crops are planted. See, Qaim M, Zilberman D, “Yield effects of genetically modified crops in developing countries,” Science. 2003 Feb. 7; 299(5608):900-2.

[0646] Known Cry proteins include: 6-endotoxins including but not limited to: the Cry1, Cry2, Cry3, Cry4, Cry5, Cry6, Cry7, Cry8, Cry9, Cry10, Cry11, Cry12, Cry13, Cry14, Cry15, Cry16, Cry17, Cry18, Cry19, Cry20, Cry21, Cry22, Cry23, Cry24, Cry25, Cry26, Cry27, Cry 28, Cry 29, Cry 30, Cry31, Cry32, Cry33, Cry34, Cry35, Cry36, Cry37, Cry38, Cry39, Cry40, Cry41, Cry42, Cry43, Cry44, Cry45, Cry 46, Cry47, Cry49, Cry 51, Cry52, Cry 53, Cry 54, Cry55, Cry56, Cry57, Cry58, Cry59. Cry60, Cry61, Cry62, Cry63, Cry64, Cry65, Cry66, Cry67, Cry68, Cry69, Cry70 and Cry71 classes of 6-endotoxin genes and the B. thuringiensis cytolytic cyt1 and cyt2 genes.

[0647] The use of Cry proteins as transgenic plant traits is well known to one skilled in the art and Cry-transgenic plants, including but not limited to, plants expressing: Cry1Ac, Cry1Ac+Cry2Ab, Cry1Ab, Cry1A.105, Cry1F, Cry1Fa2, Cry1F+Cry1Ac, Cry2Ab, Cry3A, mCry3A, Cry3Bbl, Cry34Abl, Cry35Abl, Vip3A, mCry3A, Cry9c and CBI-Bt have received regulatory approval. See, Sanahuja et al., “Bacillus thuringiensis: a century of research, development and commercial applications,” (2011) Plant Biotech Journal, April 9(3):283-300.

[0648] Pesticidal proteins also include VIP (vegetative insecticidal proteins) toxins. Entomopathogenic bacteria produce insecticidal proteins that accumulate in inclusion bodies or parasporal crystals (such as the aforementioned Cry and Cyt proteins), as well as insecticidal proteins that are secreted into the culture medium. Among the latter are the Vip proteins, which are divided into four families according to their amino acid identity. The Vip1 and Vip2 proteins act as binary toxins and are toxic to some members of the Coleoptera and Hemiptera. The Vip1 component is thought to bind to receptors in the membrane of the insect midgut, and the Vip2 component enters the cell, where it displays its ADP-ribosyltransferase activity against actin, preventing microfilament formation. Vip3 has no sequence similarity to Vip1 or Vip2 and is toxic to a wide variety of members of the Lepidoptera. Its mode of action has been shown to resemble that of the Cry proteins in terms of proteolytic activation, binding to the midgut epithelial membrane, and pore formation, although Vip3A proteins do not share binding sites with Cry proteins. The latter property makes them good candidates to be combined with Cry proteins in transgenic plants (Bacillus thuringiensis-treated crops [Bt crops]) to prevent or delay insect resistance and to broaden the insecticidal spectrum. There are commercially grown varieties of Bt cotton and Bt maize that express the Vip3Aa protein in combination with Cry proteins. For the most recently reported Vip4 family, no target insects have been found yet. See, Chakroun et al., “Bacterial Vegetative Insecticidal Proteins (Vip) from Entomopathogenic Bacteria,” Microbiol Mol Biol Rev. 2016 Mar. 2; 80(2):329-50. VIPs can be found in U.S. Pat. Nos. 5,877,012, 6,107,279 6,137,033, 7,244,820, 7,615,686, and 8,237,020 and the like.

[0649] Some currently registered PIPs are listed in Table 20.

TABLE 20
List of exemplary Plant-incorporated Protectants, which can
be combined with the recombinant plants of the disclosure
(e.g. incorporated into the genome of a soybean plant)

| | | Pesticide |
|---|---|---|
| Plant-Incorporated Protectants (PIPs) | Company and | Registration |
| Soybean | Trade Names | Numbers |
| Cry1Ac in Event 87701 Soybean PC Code | Monsanto | 524-594 |
| 006532 OECD Unique Identifier | Intacta | |
| Cry1A.105 and Cry2Ab2 in Event 87751 Soybean | Monsanto | 524-619 |
| PC Codes 006614, 006615 OECD Unique | | |
| Identifier MON-87751-7 | | |
| Cry1Ac × Cry1F in Event DAS 81419 Soybean | Mycogen | 68467-20 |
| PC Codes 006527, 006528 OECD Unique | Seeds/Dow Agro | |
| Identifier | | |
| DAS 81419 (Cry1Ac × Cry1F) | | |

### Herbicides

[0650] As aforementioned, agricultural compositions of the disclosure, which may be added to a recombinant plant as taught herein, are sometimes combined with (or contain) one or more herbicides.

[0651] In some embodiments, herbicidal compositions are applied to the plants and/or plant parts. In some embodiments, herbicidal compositions may be included in the compositions set forth herein and can be applied to a plant(s) or a part(s) thereof simultaneously or in succession, with other compounds.

[0652] Herbicides include 2,4-D, 2,4-DB, acetochlor, acifluorfen, alachlor, ametryn, atrazine, aminopyralid, benefin, bensulfuron, bensulide, bentazon, bicyclopyrone, bromacil, bromoxynil, butylate, carfentrazone, chlorimuron, chlorsulfuron, clethodim, clomazone, clopyralid, cloransulam, cycloate, DCPA, desmedipham, dicamba, dichlobenil, diclofop, diclosulam, diflufenzopyr, dimethenamid, diquat, diuron, DSMA, endothall, EPTC, ethalfluralin, ethofumesate, fenoxaprop, fluazifop-P, flucarbzone, flufenacet, flumetsulam, flumiclorac, flumioxazin, fluometuron, fluroxypyr, fomesafen, foramsulfuron, glufosinate, glyphosate, halosulfuron, hexazinone, imazamethabenz, imazamox, imazapic, imazaquin, imazethapyr, isoxaflutole, lactofen, linuron, MCPA, MCPB, mesotrione, metolachlor-s, metribuzin, indaziflam, metsulfuron, molinate, MSMA, napropamide, naptalam, nicosulfuron, norflurazon, oryzalin, oxadiazon, oxyfluorfen, paraquat, pelargonic acid, pendimethalin, phenmedipham, picloram, primisulfuron, prodiamine, prometryn, pronamide, propanil, prosulfuron, pyrazon, pyrithioac, quinclorac, quizalofop, rimsulfuron, S-metolachlor, sethoxydim, siduron, simazine, sulfentrazone, sulfometuron, sulfosulfuron, tebuthiuron, tembotrione, terbacil, thiazopyr, thifensulfuron, thiobencarb, topramezone, tralkoxydim, triallate, triasulfuron, tribenuron, triclopyr, trifluralin, and triflusulfuron.

[0653] In some embodiments, any one or more of the herbicides set forth herein may be utilized with any one or more of the plants or parts thereof set forth herein.

[0654] In some embodiments, any one or more of the herbicides set forth in the below Table 21 may be utilized.

TABLE 21
List of exemplary herbicides, which can be combined
with the recombinant plants of the disclosure

| | Herbicide | | |
|---|---|---|---|
| | Group | | |
| Site of Action | Number | Chemical Family | Herbicide |
| ACCase | 1 | Cyclohexanediones | Sethoxydim (Poast, |
| inhibitors | | | Poast Plus) |
| | | | Clethodim (Select, |
| | | | Select Max, Arrow) |
| | | Aryloxyphenoxypropionates | Fluazifop (Fusilade DX, |
| | | | component in Fusion) |
| | | | Fenoxaprop (Puma, |
| | | | component in Fusion) |
| | | | Quizalofop (Assure II, |
| | | | Targa) |
| | | Phenylpyrazolins | Pinoxaden (Axial XL) |
| ALS inhibitors | 2 | Imidazolinones | Imazethapyr (Pursuit) |
| | | | Imazamox (Raptor) |
| | | Sulfonylureas | Chlorimuron (Classic) |
| | | | Halosulfuron (Permit, |
| | | | Sandea) |
| | | | Iodosulfuron |
| | | | (component in Autumn |
| | | | Super) |
| | | | Mesosulfuron (Osprey) |
| | | | Nicosulfuron (Accent Q) |
| | | | Primisulfuron (Beacon) |
| | | | Prosulfuron (Peak) |
| | | | Rimsulfuron (Matrix, |
| | | | Resolve) |
| | | | Thifensulfuron |
| | | | (Harmony) |
| | | | Tribenuron (Express) |
| | | | Triflusulfuron (UpBeet) |
| | | Triazolopyrimidine | Flumetsulam (Python) |
| | | | Cloransulam-methyl |
| | | | (FirstRate) |
| | | | Pyroxsulam (PowerFlex |
| | | | HL) |
| | | | Florasulam (component |
| | | | in Quelex) |
| | | Sulfonylaminocarbonyltriazolinones | Propoxycarbazone |
| | | | (Olympus) |
| | | | Thiencarbazone-methyl |
| | | | (component in |
| | | | Capreno) |
| Microtubule | 3 | Dinitroanilines | Trifluralin (many |
| inhibitors (root | | | names) |
| inhibitors) | | | Ethalfluralin (Sonalan) |
| | | | Pendimethalin |
| | | | (Prowl/Prowl H₂O) |
| | | Benzamide | Pronamide (Kerb) |
| Synthetic auxins | 4 | Arylpicolinate | Halauxifen (Elevore, |
| | | | component in Quelex) |
| | | Phenoxy acetic acids | 2,4-D (Enlist One, |
| | | | others) |
| | | | 2,4-DB (Butyrac 200, |
| | | | Butoxone 200) |
| | | | MCPA |
| | | Benzoic acids | Dicamba (Banvel, |
| | | | Clarity, DiFlexx, |
| | | | Engenia, XtendiMax; |
| | | | component in Status) |
| | | Pyridines | Clopyralid (Stinger) |
| | | | Fluroxypyr (Starane |
| | | | Ultra) |
| Photosystem II | 5 | Triazines | Atrazine |
| inhibitors | | | Simazine (Princep, Sim- |
| | | | Trol) |
| | | Triazinone | Metribuzin (Metribuzin, |
| | | | others) |
| | | | Hexazinone (Velpar) |
| | | Phenyl-carbamates | Desmedipham (Betenex) |
| | | | Phenmedipham |
| | | | (component in Betamix) |
| | 6 | Uracils | Terbacil (Sinbar) |
| | | Benzothiadiazoles | Bentazon (Basagran, |
| | | | others) |
| | | Nitriles | Bromoxynil (Buctril, |
| | | | Moxy, others) |
| | 7 | Phenylureas | Linuron (Lorox, Linex) |
| Lipid synthesis | 8 | Thiocarbamates | EPTC (Eptam) |
| inhibitor | | | |
| EPSPS inhibitor | 9 | Organophosphorus | Glyphosate |
| Glutamine | 10 | Organophosphorus | Glufosinate (Liberty, |
| synthetase | | | Rely) |
| inhibitor | | | |
| Diterpene | 13 | Isoxazolidinone | Clomazone (Command) |
| biosynthesis | | | |
| inhibitor | | | |
| (bleaching) | | | |
| Protoporphyrinogen | 14 | Diphenylether | Acifluorfen (Ultra |
| oxidase | | | Blazer) |
| inhibitors (PPO) | | | Fomesafen (Flexstar, |
| | | | Reflex) |
| | | | Lactofen (Cobra, |
| | | | Phoenix) |
| | | N-phenylphthalimide | Flumiclorac (Resource) |
| | | | Flumioxazin (Valor, |
| | | | Valor EZ, Rowel) |
| | | Aryl triazolinone | Sulfentrazone |
| | | | (Authority, Spartan) |
| | | | Carfentrazone (Aim) |
| | | | Fluthiacet-methyl |
| | | | (Cadet) |
| | | Pyrazoles | Pyraflufen-ethyl (Vida) |
| | | Pyrimidinedione | Saflufenacil (Sharpen) |
| Long-chain fatty | 15 | Acetamides | Acetochlor (Harness, |
| acid inhibitors | | | Surpass NXT, |
| | | | Breakfree NXT, |
| | | | Warrant) |
| | | | Dimethenamid-P |
| | | | (Outlook) |
| | | | Metolachlor (Parallel) |
| | | | Pyroxasulfone (Zidua, |
| | | | Zidua SC) |
| | | | s-metolachlor (Dual |
| | | | Magnum, Dual II |
| | | | Magnum, Cinch) |
| | | | Flufenacet (Define) |
| Specific site | 16 | Benzofuranes | Ethofumesate (Nortron) |
| unknown | | | |
| Auxin transport | 19 | Semicarbazone | diflufenzopyr |
| inhibitor | | | (component in Status) |
| Photosystem I | 22 | Bipyridiliums | Paraquat (Gramoxone, |
| inhibitors | | | Parazone) |
| | | | Diquat (Reglone) |
| 4-HPPD | 27 | Isoxazole | Isoxaflutole (Balance |
| inhibitors | | Pyrazole | Flexx) |
| (bleaching) | | Pyrazolone | Pyrasulfotole |
| | | Triketone | (component in Huskie) |
| | | | Topramezone |
| | | | (Armezon/Impact) |
| | | | Bicyclopyrone |
| | | | (component in Acuron) |
| | | | Mesotrione (Callisto) |
| | | | Tembotrione (Laudis) |

### Fungicides

[0655] As aforementioned, agricultural compositions of the disclosure, which may be added to a recombinant plant as taught herein, are sometimes combined with (or contain) one or more fungicides.

[0656] In some embodiments, fungicidal compositions may be included in the compositions set forth herein, and can be applied to a plant(s) or a padt(s) thereof simultaneously or in succession, with other compounds. The fungicides include azoxystrobin, captan, carboxin, ethaboxam, fludioxonil, mefenoxam, fludioxonil, thiabendazole, thiabendaz, ipconazole, mancozeb, cyazofamid, zoxamide, metalaxyl, PCNB, metaconazole, pyraclostrobin, Bacillus subtilis strain QST 713, sedaxane, thiamethoxam, fludioxonil, thiram, tolclofos-methyl, trifloxystrobin, Bacillus subtilis strain MBI 600, pyraclostrobin, fluoxastrobin, Bacillus pumilus strain QST 2808, chlorothalonil, copper, flutriafol, fluxapyroxad, mancozeb, gludioxonil, penthiopyrad, triazole, propiconaozole, prothioconazole, tebuconazole, fluoxastrobin, pyraclostrobin, picoxystrobin, qols, tetraconazole, trifloxystrobin, cyproconazole, flutriafol, SDHI, EBDCs, sedaxane, MAXIM QUATTRO (gludioxonil, mefenoxam, azoxystrobin, and thiabendaz), RAXIL (tebuconazole, prothioconazole, metalaxyl, and ethoxylated tallow alkyl amines), and benzovindiflupyr.

[0657] In some embodiments, any one or more of the fungicides set forth herein may be utilized with any one or more of the plants or parts thereof set forth herein.

### Nematicides

[0658] As aforementioned, agricultural compositions of the disclosure, which may be added to a recombinant plant as taught herein, are sometimes combined with (or contain) one or more nematicides.

[0659] In some embodiments, nematicidal compositions may be included in the compositions set forth herein, and can be applied to a plant(s) or a part(s) thereof simultaneously or in succession, with other compounds. The nematicides may be selected from D-D, 1,3-dichloropropene, ethylene dibromide, 1,2-dibromo-3-chloropropane, methyl bromide, chloropicrin, metam sodium, dazomet, methylisothiocyanate, sodium tetrathiocarbonate, aldicarb, aldoxycarb, carbofuran, oxamyl, ethoprop, fenamiphos, cadusafos, fosthiazate, terbufos, fensulfothion, phorate, DiTera, clandosan, sincocin, methyl iodide, propargyl bromide, 2,5-dihydroxymethyl-3,4-dihydroxypyrrolidine (DMDP), any one or more of the avermectins, sodium azide, furfural, Bacillusfirmus, abamectrin, thiamethoxam, fludioxonil, clothiandin, salicylic acid, and benzo-(1,2,3)-thiadiazole-7-carbothioic acid S-methyl ester.

[0660] In some embodiments, any one or more of the nematicides set forth herein may be utilized with any one or more of the plants or parts thereof set forth herein.

[0661] In some embodiments, any one or more of the nematicides, fungicides, herbicides, insecticides, and/or pesticides set forth herein may be utilized with any one or more of the plants or parts thereof set forth herein.

### Fertilizers, Nitrogen Stabilizers, and Urease Inhibitors

[0662] As aforementioned, agricultural compositions of the disclosure, which may be added to a recombinant plant as taught herein, are sometimes combined with (or contain) one or more of a: fertilizer, nitrogen stabilizer, or urease inhibitor.

[0663] Fertilizers include anhydrous ammonia, urea, ammonium nitrate, and urea-ammonium nitrate (UAN) compositions, among many others.

[0664] Nitrogen stabilizers include nitrapyrin, 2-chloro-6-(trichloromethyl) pyridine, N-SERVE 24, INSTINCT, dicyandiamide (DCD).

[0665] Further, stabilized forms of fertilizer can be used. For example, a stabilized form of fertilizer is SUPER U, containing 46% nitrogen in a stabilized, urea-based granule, SUPERU contains urease and nitrification inhibitors to guard from dentrification, leaching, and volatilization. Stabilized and targeted foliar fertilizer such as NITAMIN may also be used herein.

[0666] Slow- or controlled-release fertilizer that may be used herein entails: A fertilizer containing a plant nutrient in a form which delays its availability for plant uptake and use after application, or which extends its availability to the plant significantly longer than a reference ‘rapidly available nutrient fertilizer’ such as ammonium nitrate or urea, ammonium phosphate or potassium chloride. Such delay of initial availability or extended time of continued availability may occur by a variety of mechanisms. These include controlled water solubility of the material by semi-permeable coatings, occlusion, protein materials, or other chemical forms, by slow hydrolysis of water-soluble low molecular weight compounds, or by other unknown means.

[0667] Stabilized nitrogen fertilizer that may be used herein entails: A fertilizer to which a nitrogen stabilizer has been added. A nitrogen stabilizer is a substance added to a fertilizer which extends the time the nitrogen component of the fertilizer remains in the soil in the urea-N or ammoniacal-N form.

[0668] Nitrification inhibitor that may be used herein entails: A substance that inhibits the biological oxidation of ammoniacal-N to nitrate-N. Some examples include: (1) 2-chloro-6-(trichloromethyl-pyridine), common name Nitrapyrin, manufactured by Dow Chemical; (2) 4-amino-1,2,4-6-triazole-HCl, common name ATC, manufactured by Ishihada Industries; (3) 2,4-diamino-6-trichloro-methyltriazine, common name CI-1580, manufactured by American Cyanamid; (4) Dicyandiamide, common name DCD, manufactured by Showa Denko; (5) Thiourea, common name TU, manufactured by Nitto Ryuso; (6) 1-mercapto-1,2,4-triazole, common name MT, manufactured by Nippon; (7) 2-amino-4-chloro-6-methyl-pyramidine, common name AM, manufactured by Mitsui Toatsu; (8) 3,4-dimethylpyrazole phosphate (DMPP), from BASF; (9) 1-amide-2-thiourea (ASU), from Nitto Chemical Ind.; (10) Ammoniumthiosulphate (ATS); (11) 1H-1,2,4-triazole (HPLC); (12) 5-ethylene oxide-3-trichloro-methly 1,2,4-thiodiazole (Terrazole), from Olin Mathieson; (13) 3-methylpyrazole (3-MP); (14) 1-carbamoyle-3-methyl-pyrazole (CMP); (15) Neem; and (16) DMPP.

[0669] Urease inhibitor that may be used herein entails: A substance that inhibits hydrolytic action on urea by the enzyme urease. Thousands of chemicals have been evaluated as soil urease inhibitors (Kiss and Simihaian, 2002). However, only a few of the many compounds tested meet the necessary requirements of being non toxic, effective at low concentration, stable, and compatible with urea (solid and solutions), degradable in the soil and inexpensive. They can be classified according to their structures and their assumed interaction with the enzyme urease (Watson, 2000, 2005). Four main classes of urease inhibitors have been proposed: (a) reagents which interact with the sulphydryl groups (sulphydryl reagents), (b) hydroxamates, (c) agricultural crop protection chemicals, and (d) structural analogues of urea and related compounds. N-(n-Butyl) thiophosphoric triamide (NBPT), phenylphosphorodiamidate (PPD/PPDA), and hydroquinone are probably the most thoroughly studied urease inhibitors (Kiss and Simihaian, 2002). Research and practical testing has also been carried out with N-(2-nitrophenyl) phosphoric acid triamide (2-NPT) and ammonium thiosulphate (ATS). The organo-phosphorus compounds are structural analogues of urea and are some of the most effective inhibitors of urease activity, blocking the active site of the enzyme (Watson, 2005).

### Examples of Genetically Modified Soybean Plants

[0670] The recombinant plants taught herein, which contain expression constructs for expressing milk proteins, may be added to or “stacked” into the genome of already genetically modified plants, see Table 22. For example, the following genetically modified plant events, which have been approved in one or more countries, can be utilized as a base soybean variety, into which the milk protein expression events can be added/stacked.

TABLE 22
Soybean Traits, which can be stacked with milk protein expression events
Glycine max L. Soybean

| Event | Company | Description |
|---|---|---|
| A2704-12, | Bayer CropScience | Glufosinate ammonium herbicide |
| A2704-21, | (Aventis | tolerant soybean produced by |
| A5547-35 | CropScience | inserting a modified |
| | (AgrEvo)) | phosphinothricin acetyltransferase |
| | | (PAT) encoding gene from the soil |
| | | bacterium Streptomyces |
| | | viridochromogenes. |
| A5547-127 | Bayer CropScience | Glufosinate ammonium herbicide |
| | (Aventis | tolerant soybean produced by |
| | CropScience | inserting a modified |
| | (AgrEvo)) | phosphinothricin acetyltransferase |
| | | (PAT) encoding gene from the soil |
| | | bacterium Streptomyces |
| | | viridochromogenes. |
| BPS-CV127-9 | BASF Inc. | The introduced csr1-2 gene from |
| | | Arabidopsis thaliana encodes an |
| | | acetohydroxyacid synthase protein |
| | | that confers tolerance to |
| | | imidazolinone herbicides due to a |
| | | point mutation that results in a |
| | | single amino acid substitution in |
| | | which the serine residue at position |
| | | 653 is replaced by asparagine |
| | | (S653N). |
| DP-305423 | Pioneer Hi-Bred | High oleic acid soybean produced |
| | International Inc. | by inserting additional copies of a |
| | | portion of the omega 6 desaturase |
| | | encoding gene, gm-fad2-1 |
| | | resulting in silencing of the |
| | | endogenous omega-6 desaturase |
| | | gene (FAD2-1). |
| DP356043 | Pioneer Hi-Bred | Soybean event with two herbicide |
| | International Inc. | tolerance genes: glyphosate N- |
| | | acetlytransferase, which detoxifies |
| | | glyphosate, and a modified |
| | | acetolactate synthase (ALS) gene |
| | | which is tolerant to ALS-inhibiting |
| | | herbicides. |
| G94-1, | DuPont Canada | High oleic acid soybean produced |
| G94-19, | Agricultural | by inserting a second copy of the |
| G168 | Products | fatty acid desaturase (Gm Fad2-1) |
| | | encoding gene from soybean, |
| | | which resulted in “silencing” of |
| | | the endogenous host gene. |
| GTS 40-3-2 | Monsanto Company | Glyphosate tolerant soybean |
| | | variety produced by inserting a |
| | | modified 5-enolpyruvylshikimate- |
| | | 3- phosphate synthase (EPSPS) |
| | | encoding gene from the soil |
| | | bacterium Agrobacterium |
| | | tumefaciens. |
| GU262 | Bayer CropScience | Glufosinate ammonium herbicide |
| | (Aventis | tolerant soybean produced by |
| | CropScience | inserting a modified |
| | (AgrEvo)) | phosphinothricin acetyltransferase |
| | | (PAT) encoding gene from the soil |
| | | bacterium Streptomyces |
| | | viridochromogenes. |
| MON87701 | Monsanto Company | Resistance to Lepidopteran pests |
| | | of soybean including velvetbean |
| | | caterpillar (Anticarsia gemmatalis) |
| | | and soybean looper (Pseudoplusia |
| | | includens). |
| MON87701 × | Monsanto Company | Glyphosate herbicide tolerance |
| MON89788 | | through expression of the EPSPS |
| | | encoding gene from A. tumefaciens |
| | | strain CP4, and resistance to |
| | | Lepidopteran pests of soybean |
| | | including velvetbean caterpillar |
| | | (Anticarsia gemmatalis) and |
| | | soybean looper (Pseudoplusia |
| | | includens) via expression of the |
| | | Cry1Ac encoding gene from B. |
| | | thuringiensis. |
| MON89788 | Monsanto Company | Glyphosate-tolerant soybean |
| | | produced by inserting a modified |
| | | 5-enolpyruvylshikimate-3- |
| | | phosphate synthase (EPSPS) |
| | | encoding aroA (epsps) gene from |
| | | Agrobacterium tumefaciens CP4. |
| OT96-15 | Agriculture & | Low linolenic acid soybean |
| | Agri-Food | produced through traditional cross- |
| | Canada | breeding to incorporate the novel |
| | | trait from a naturally occurring |
| | | fan1 gene mutant that was selected |
| | | for low linolenic acid. |
| W62, W98 | Bayer CropScience | Glufosinate ammonium herbicide |
| | (Aventis | tolerant soybean produced by |
| | CropScience | inserting a modified |
| | (AgrEvo)) | phosphinothricin acetyltransferase |
| | | (PAT) encoding gene from the soil |
| | | bacterium Streptomyces |
| | | hygroscopicus. |

### Soybean Planting Density

[0671] Plant spacing in the field is very important and plays a significant role in determining plant growth and development. Plant spacing should be thought of as existing in two directions: 1) within row spacing and 2) between row spacing. At a given plant population, as row spacing decreases the plant spacing within the row increases and results in a more equidistant plant spacing. At a fixed row width, as plant population increases the plant spacing within the row decreases and interplant competition increases. Obviously, both factors can be adjusted to provide optimal plant spacing and typically plant population increases as row spacing decreases. The expectation would be that narrow row spacing and increased plant population would improve light interception and that would then have a cascade effect, increasing crop growth rate and potentially improving seed production. An important consideration would be that as plant population increases the available source (light) per plant decreases. Since there is good evidence that soybean is already source limited, any more reduction on source capacity would come at a cost of yield per plant.

[0672] A low plant population can be competitive with higher plant populations as long as the plant population is uniformly distributed in the field. At lower populations interplant competition is reduced and each individual plant has a greater opportunity to produce more seeds. Research has shown that photosynthetic rate is greater and maintained longer in response to larger sink size (seed number) by increased protein levels in leaves and reduced leaf senescence of older leaves.

[0673] The risks associated with reduced plant populations is that pods form closer to the ground increasing harvest losses and the plant must maintain a high growth rate and leaf area throughout the season to remain competitive with higher populations. Soybean is able to compensate for poor stands by producing more branches resulting in yields comparable to higher plant populations. However, low plant populations may result in lower pod height, lodging of lateral branches, and higher weed populations, all of which may result in harvest losses.

[0674] An important consideration when selecting the correct seeding rate is that seeds planted per acre will not be the same as plants per acre. Not all of the seed that is planted will germinate or grow to reach plant maturity. The proper way to think about seeding rate is the number of plants that need to reach maturity to maximize yield. The term plant population refers to the number of soybean plants per acre. Seeding rate or planting rate refers to the number of soybean seeds planted per acre to attain a certain plant population. Most farmers find it easier and more reliable to count number of seeds per foot of row or seeds per acre instead of pounds or bushels per acre. Seed size varies from one variety to another; therefore one variety may have fewer seeds per pound than another variety. Plant population depends on seedbed conditions and planter settings. Planting into a poor seedbed, use of poor quality seed, inaccurate planter adjustment, planting too fast, soil crusting, soil moisture extremes, and environmentally induced plant injuries such as herbicide drift, pathogens, insects, hail, or frost all reduce plant population requiring a greater seeding rate. For example, if 120,000 plants per acre is the plant population needed at harvest to maximize yield then more than 120,000 seeds will need to be planted to compensate for plant loss throughout the season. Increasing the seeding rate by 15 to 30% over desired final plant stand to compensate for plant loss is a good estimate.

[0675] Agronomic studies over the past 20 years have often shown that the chance of getting yield increases as plant population moves above 100,000 plants per acre is small. However, there are cases where 100,000 plants per acre is not enough. Nevertheless, most producers have resisted lowering their planting rates accordingly. In part, this is because current university recommendations often include planting 140,000 to 225,000 seeds per acre, with adjustments depending on row spacing and planting

[0676] To answer questions about whether current seeding rates are appropriate, numerous studies were initiated in 2003 to update university and extension service recommendations. The data points to a need for 100,000 healthy uniform distributed plants per acre. To achieve such, a seeding rate of 125,000 to 140,000 viable seeds per acre (need to be increased if the germination is below 90%) can be utilized. However, the rate can be modified as needed. For example, with wet seedbed conditions or with a lot of residues (e.g., reduced tillage practices), then it may be advantageous to increase seeding rate to 140,000 seeds per acre. A decision tool is available from several universities and extension service providers to help target the final stand of 100,000 plants per acre. Accordingly, for a 15 inch row spacing, one could utilize 125,000 to 140,000 seeds per acre. For a 30 inch row spacing, one could utilize 125,000 to 140,000 seeds per acre.

[0677] Improved planter technology and increased seed quality have resulted in more accurate plant populations and stand establishment that are only slightly reduced from the seeding rate, and do not require over seeding. (See the Iowa State Extension Service's detailed recommendations and data on soybean planting density, from which the aforementioned section was obtained, on the world wide web at crops.extension.iastate.edu/encyclopedia/soybean-plant-population).

### Soybean Varieties

[0678] Soybean maturity groups (MG) are latitudinal zones developed to define where a soybean genetic package best fits based on photoperiod and temperature. MGs ranging from 000 for the very early maturing varieties to 9 for the later. Gradations within MGs are also commonly noted by adding a decimal to the MG number. A variety is classified to a specific MG according to the length of period from planting to maturity. All MGs are applicable to the disclosure herein and can be utilized to produce recombinant milk proteins.

### Common Soybean Varieties

[0679] As exemplary embodiments, the following tables illustrate various MG 4 and MG 5 soybean varieties that are applicable for the genomic architecture edits of the present disclosure, which can create robust biofactories to produce recombinant proteins, e.g., recombinant milk proteins.

[0680] The soybean varieties in the following tables attempt to group various varieties that are genetically identical, but which have various branding designations. (See University of Arkansas Extension Service research publication: “2021 Soybean Cross Reference Guide.”).

### Fatty Acid Modulation

[0681] In some embodiments, the present disclosure teaches methods for modulating fatty acid profiles of plant-based products to better mimic their intended animal-based counterpart. Products with modulated fatty acid profiles are also envisioned. In some embodiments, fatty acid modulation is achieved by blending of one or more plant-based oil/fat to adjust the fatty acid profile of the original product.

[0682] In some embodiments, a difference in a fatty acid profile can result in a difference in flavor and texture. For example, milk fat is composed of triacylglycerides from a wide range of fatty acids. The fatty acids can contribute to the melting properties, mouthfeel, and/or flavor of a food product. Short chain fatty acids (SCFA) impart the characteristic flavor to dairy products with bovine lipids being higher in C4:0 (butyric acid) while caprine lipids have relatively higher levels of C6:0 (caproic acid), C8:0 (caprylic acid), and C:10 (capric). Milk fats are the primary source of SCFA in our diets. The melting properties of a triglyceride are correlated with chain length and degree of saturation of each of the three fatty acids bonded to the glycerine backbone. Devi and Khatkar, 2017, incorporated by reference herein, provides a list of the melting properties of individual fatty acids as well as some covalently bonded compounds with those fatty acids. Knothe and Dunn, 2009, incorporated by reference herein, shows some melting properties of butter and selected vegetable lipids.

[0683] Triacylglycerides with lower melting points, typical of short chain and unsaturated fatty acids, release their flavors quickly in the mouth. Flavor release of cheeses made with fewer lower melting fatty acids can be improved by eating from a warm temperature (e.g. room or cooked). Lower melting fats have less of a creamy texture than those with a melting temperature than about 30 C. Fats that contain a significant amount triacylglycerides with a melt point greater than about 40 C are described as waxy. Those with a melting point of 10 C or less are often described as oily.

[0684] Milkfats have diverse fatty acid profiles and are higher in SCFA than plant fats and the milk triglycerides are melted at body temperature. Palm oil has a similar melt point to fat, but two fatty acids, C16:0 and C18:1, represent 85% of the fatty acid profile and C18:2 contributes another 10%. Palm oil is used to replace milkfat in a number of applications including frozen desserts. While its texture is close to milkfat, it lacks the flavor release of butter. Coconut oil has a lower melt point than milkfat and is also used in some dairy alternatives. The melting profile of coconut oil is much steeper than milkfat and it does not release flavors as quickly as milkfat. The high level of C12:0 can impart a soapy flavor to products. Plant based oils (e.g. soy, sunflower, canola, etc.) have a high level of unsaturated fatty acids that impart a very low melting point and are susceptible to oxidative rancidity. These lipids are preferred for their low cost but are generally considered inferior to harder fats in most food applications. Hydrogenation is used to impart properties that are closer to animal fats.

[0685] In some embodiments, blending lipids can extend expensive lipids and/or impart properties different from a single fat source. Butter can be blended with vegetable oils to produce a spreadable product from the refrigerator. Hydrogenation of oils or fractionation to separate high melt fractions for shortening and frying raises the melt point of oils. For example, a soybean oil with high levels of SCFA combined with other lipid sources would give an improved fat for use in dairy alternatives.

[0686] In some embodiments, a composition does not have a fatty acid profile comprising: palmitic acid (16:0) at about 5-15%, stearic acid (18:0) at about 1-5%, oleic acid (18:1) at about 15-20%, linoleic acid (18:2) at about 50-60%, and linolenic acid (18:3) at about 10-15% wherein the fatty acid profile represents (wt/wt) percent over total fatty acids. In some embodiments, a composition does not have a fatty acid profile comprising: palmitic acid (16:0) at about 10%, stearic acid (18:0) at about 4%, oleic acid (18:1) at about 18%, linoleic acid (18:2) at about 55%, and linolenic acid (18:3) at about 13% wherein the fatty acid profile represents (wt/wt) percent over total fatty acids.

[0687] In some embodiments, a composition comprises a fatty acid profile comprising palmitic acid (16:0) at about 23-32% wherein the fatty acid profile represents (wt/wt) percent over total fatty acids. In some embodiments, a composition comprises a fatty acid profile comprising palmitic acid (16:0) at about 13-42% wherein the fatty acid profile represents (wt/wt) percent over total fatty acids. In some embodiments, a composition comprises a fatty acid profile comprising stearic acid (18:0) at about 21-26% wherein the fatty acid profile represents (wt/wt) percent over total fatty acids. In some embodiments, a composition comprises a fatty acid profile comprising stearic acid (18:0) at about 11-36% wherein the fatty acid profile represents (wt/wt) percent over total fatty acids. In some embodiments, a composition comprises a fatty acid profile comprising oleic acid (18:1) at about 17-27% wherein the fatty acid profile represents (wt/wt) percent over total fatty acids. In some embodiments, a composition comprises a fatty acid profile comprising oleic acid (18:1) at about 7-37% wherein the fatty acid profile represents (wt/wt) percent over total fatty acids. In some embodiments, a composition comprises a fatty acid profile comprising linoleic acid (18:2) at about 0.5-3.1% wherein the fatty acid profile represents (wt/wt) percent over total fatty acids. In some embodiments, a composition comprises a fatty acid profile comprising linoleic acid (18:2) at about 0.1-13.1% wherein the fatty acid profile represents (wt/wt) percent over total fatty acids.

[0688] In some embodiments, a composition comprises a fatty acid profile comprising: palmitic acid (16:0) at about 23-32%; stearic acid (18:0) at about 21%-26%; oleic acid (18:1) at about 17-27%; and/or linoleic acid (18:2) at about 0.5-3.1%, wherein the fatty acid profile represents (wt/wt) percent over total fatty acids. In some embodiments, a composition comprises a fatty acid profile comprising one or more of: palmitic acid (16:0) at about 23-32%; stearic acid (18:0) at about 21%-26%; oleic acid (18:1) at about 17-27%; and linoleic acid (18:2) at about 0.5-3.1%, wherein the fatty acid profile represents (wt/wt) percent over total fatty acids. In some embodiments, a composition comprises a fatty acid profile comprising palmitic acid (16:0) at about 13-42%; stearic acid (18:0) at about 11-36%; oleic acid (18:1) at about 7-37%; and linoleic acid (18:2) at about 0.01-13.1%, wherein the fatty acid profile represents (wt/wt) percent over total fatty acids. In some embodiments, a composition comprises a fatty acid profile comprising palmitic acid (16:0) at about 28%; stearic acid (18:0) at about 11%; oleic acid (18:1) at about 22%; and linoleic acid (18:2) at about 2.5%, wherein the fatty acid profile represents (wt/wt) percent over total fatty acids.

[0689] In some embodiments, a composition comprises a fatty acid profile comprising any one or more of: C4:0 fatty acids at about 1%-7%; C6:0 fatty acids at about 0.5-6%; C8:0 fatty acid at about 0.5%-4.5%; C10:0 fatty acids at about 0.4%-6%; C12:0 fatty acids at about 0.4%-6.5%; C14:0 fatty acids at about 7%-13%; C16:0 fatty acids at about 26%-32%; C16:1 fatty acid at about 0.2%-4.2%; C18:0 fatty acids at about 14%-21%; C18:1 fatty acids at about 18%-26%; and/or C18:2 fatty acids at about 0.5%-7% wherein the fatty acid profile represents (wt/wt) percent over total fatty acids. In some embodiments, a composition comprises a fatty acid profile comprising any one or more of: C4:0 fatty acids at about 0.01%-17%; C6:0 fatty acids at about 0.01-16%; C8:0 fatty acid at about 0.01-14.5%; C10:0 fatty acids at about 0.01%-16%; C12:0 fatty acids at about 0.01%-16.5%; C14:0 fatty acids at about 0.1-23%; C16:0 fatty acids at about 16%-42%; C16:1 fatty acid at about 0.01-14.2%; C18:0 fatty acids at about 4-31%; C18:1 fatty acids at about 8-36%; and/or C18:2 fatty acids at about 0.01-17% wherein the fatty acid profile represents (wt/wt) percent over total fatty acids.

[0690] In some embodiments, a composition comprises a fatty acid profile comprising C4:0 fatty acids at about 1%-7%; C6:0 fatty acids at about 0.5-6%; C8:0 fatty acids at about 0.5%-4.5%; C10:0 fatty acids at about 0.4%-6%; C12:0 fatty acids at about 0.4%-6.5%; C14:0 fatty acids at about 7%-13%; C16:0 fatty acids at about 26%-32%; C16:1 fatty acids at about 0.2%-4.2%; C18:0 fatty acids at about 14%-21%; C18:1 fatty acids at about 18%-26%; and/or C18:2 fatty acids at about 0.5%-7% wherein the fatty acid profile represents (wt/wt) percent over total fatty acids.

[0691] In some embodiments, a composition comprises a fatty acid profile comprising: C4:0 fatty acids at about 0.01%-17%; C6:0 fatty acids at about 0.01-16%; C8:0 fatty acids at about 0.01%-14.5%; C10:0 fatty acids at about 0.01%-16%; C12:0 fatty acids at about 0.01%-16.5%; C14:0 fatty acids at about 0.1%-23%; C16:0 fatty acids at about 16%-42%; C16:1 fatty acids at about 0.01%-14.2%; C18:0 fatty acids at about 4%-31%; C18:1 fatty acids at about 8%-36%; and/or C18:2 fatty acids at about 0.01%-17% wherein the fatty acid profile represents (wt/wt) percent over total fatty acids.

[0692] In some embodiments, a composition comprises a fatty acid profile comprising: C4:0 fatty acids at about 4.34%; C6:0 fatty acids at about 2.70%; C8:0 fatty acids at about 1.60%; C10:0 fatty acids at about 3.40%; C12:0 fatty acids at about 3.48%; C14:0 fatty acids at about 10.00%; C16:0 fatty acids at about 29.20%; C16:1 fatty acids at about 1.29%; C18:0 fatty acids at about 17.47%; C18:1 fatty acids at about 22.84%; and/or C18:2 fatty acids at about 3.67% wherein the fatty acid profile represents (wt/wt) percent over total fatty acids.

[0693] In some embodiments, any of the aforementioned fatty acids can be at a percent of from about 0%, 0.2%, 0.4%, 0.6%, 0.8%, 1%, 1.2%, 1.4%, 1.6%, 1.8%, 2%, 2.2%, 2.4%, 2.6%, 2.8%, 30%, 3.20%, 3.40%, 3.60%, 3.80%, 40%, 4.20%, 4.40%, 4.60%, 4.80%, 50%, 5.2%, 5.4%, 5.6%, 5.80%, 60%, 6.20%, 6.40%, 6.60%, 6.80%, 70%, 7.20%, 7.40%, 7.60%, 7.80%, 8%, 8.2%, 8.4%, 8.6%, 8.8%, 9%, 9.2%, 9.4%, 9.6%, 9.8%, 10%, 10.2%, 10.4%, 10.6%, 10.8%, 11%, 11.2%, 11.4%, 11.6%, 11.8%, 120%, 12.2%, 12.4%, 12.6%, 12.8%, 13%, 13.2%, 13.4%, 13.6%, 13.8%, 14%, 14.2%, 14.4%, 14.6%, 14.8%, 15%, 15.2%, 15.4%, 15.6%, 15.8%, 16%, 16.2%, 16.4%, 16.6%, 16.8%, 17%, 17.2%, 17.4%, 17.6%, 17.8%, 18%, 18.2%, 18.4%, 18.6%, 18.8%, 19%, 19.2%, 19.4%, 19.6%, 19.8%, 20%, 20.2%, 20.4%, 20.6%, 20.8%, 21%, 21.2%, 21.4%, 21.6%, 21.8%, 220%, 22.20%, 22.40%, 22.6%, 22.8%, 23%, 23.2%, 23.4%, 23.6%, 23.8%, 24%, 24.2%, 24.4%, 24.6%, 24.8%, 25%, 25.2%, 25.4%, 25.6%, 25.8%, 26%, 26.2%, 26.4%, 26.6%, 26.8%, 27%, 27.2%, 27.4%, 27.6%, 27.8%, 28%, 28.2%, 28.4%, 28.6%, 28.8%, 29%, 29.2%, 29.4%, 29.6%, 29.8%, 30%, 30.2%, 30.4%, 30.6%, 30.8%, 31%, 31.2%, 31.4%, 31.6%, 31.8%, 32%, 32.2%, 32.4%, 32.6%, 32.8%, 33%, 33.2%, 33.4%, 33.6%, 33.8%, 34%, 34.2%, 34.4%, 34.6%, 34.8%, 35%, 35.2%, 35.4%, 35.6%, 35.8%, 36%, 36.2%, 36.4%, 36.6%, 36.8%, 37%, 37.2%, 37.4%, 37.6%, 37.8%, 38%, 38.2%, 38.4%, 38.6%, 38.8%, 39%, 39.2%, 39.4%, 39.6%, 39.8%, 400%, 40.20%, 40.40%, 40.6%, 40.80%, 41%, 41.2%, 41.4%, 41.6%, 41.8%, 42%, 42.2%, 42.4%, 42.6%, 42.8%, 43%, 43.2%, 43.4%, 43.6%, 43.8%, 44%, 44.2%, 44.4%, 44.6%, 44.8%, 45%, 45.2%, 45.4%, 45.6%, 45.8%, 46%, 46.2%, 46.4%, 46.6%, 46.8%, 47%, 47.2%, 47.4%, 47.6%, 47.8%, 48%, 48.2%, 48.4%, 48.6%, 48.8%, 49%, 49.2%, 49.4%, 49.6%, 49.8%, or up to about 50% as represented by (wt/wt) percent over total fatty acids.

[0694] In some embodiments, a composition comprises added short chain fatty acids. Short chain fatty acids can be added in the form of a plant oil. Plant oils are described elsewhere herein but in some embodiments a plant oil is selected from the group consisting of soybean oil, palm oil, coconut oil, almond oil, avocado oil, cocoa butter oil, corn oil, cottonseed oil, flax seed oil, grapeseed oil, hemp oil, olive oil, palm kernel oil, peanut oil, pumpkin seed oil, rice bran oil, safflower seed oil, sesame seed oil, sunflower seed oil, walnut oil, and combinations thereof.

### Expression of Transgenes in Plant Cells

[0695] Provided are compositions and methods of expressing a transgene in a plant cell, the method comprising: (i) providing a plant cell lacking at least one endogenous promoter; (ii) transforming the plant cell with a nucleic acid comprising a promoter and a transgene, wherein the promoter has the same sequence as the endogenous promoter; and (ii) maintaining the plant cell under conditions wherein the transgene is expressed. In some embodiments, the plant cell is a dicot cell from soybean, lima bean, Arabidopsis, tobacco, rice, maize, barley, sorghum, wheat or oat. In some embodiments, the plant cell is a monocot cell from turf grass, maize, rice, oat, wheat, barley, sorghum, orchid, iris, lily, onion, palm, or duckweed. In some embodiments, the promoter is the Glycinin 1 or Seed 2 promoter. In some embodiments, the transgene is a mammalian, avian, or plant gene. In some embodiments, the transgene encodes a milk protein selected from α-S1 casein, α-S2 casein, β-casein, κ-casein, para-κ-casein, 0-lactoglobulin, α-lactalbumin, lysozyme, lactoferrin, lactoperoxidase, serum albumin, or an immunoglobulin. In some embodiments, a transgene encodes an avian protein selected from ovalbumin, ovotransferrin, ovoglobulin, and lysozyme. In some embodiments, a transgene encodes a plant protein selected from oleosins, leghemoglobin, extension-like protein family, prolamin, glutenin, gamma-kafirin preprotein, α-globulin, basic 7S globulin precursor, 2S albumin, β-conglycinins, glycinins, canein, zein, patatin, kunitz-trypsin inhibitor, bowman-birk inhibitor, and cystatine.

[0696] Provided is a plant cell lacking at least one endogenous promoter; wherein the plant cell comprises a nucleic acid comprising a promoter and a transgene; wherein the promoter has the same sequence as the endogenous promoter.

[0697] Provided in Tables 23-31 are exemplary plants and varieties of the same that can be utilized in any of the compositions and methods of the disclosure.

TABLE 23
Exemplary Conventional Maturity Group IV Varieties

| | |
|---|---|
| Variety of Interest | Same Varieties as the Variety of Interest |

| | | |
|---|---|---|
| Armor 49-C3 | Progeny P5191 | GoSoy Leland |
| GoSoy Ireane | USG Ellis | |
| GoSoy Leland | Armor 49-C3 | Progeny P5191 |
| Progeny P5191 | GoSoy Leland | Armor 49-C3 |
| USG Ellis | GoSoy Ireane | |

TABLE 24
Exemplary Maturity Group IV Varieties (Enlist)

| Variety of Interest | Same Varieties as the Variety of Interest | |
|---|---|---|
| Bravo B4609E | Local Seed ZS4694E3S | |
| Dyna-Gro S42EN89 | Progeny P4241 E3 | |
| Dyna-Gro S46EN29 | Terral REV 4990E | Pioneer P49T62E |
| GoSoy 482E18 | USG 7479ET | |
| Local Seed ZS4694E3S | Bravo B4609E | |
| Pioneer P48T22E | Terral REV 5190E | Progeny P5211 E3 |
| Pioneer P49T62E | Dyna-Gro S46EN29 | Terral REV 4990E |
| Progeny P4241 E3 | Dyna-Gro S42EN89 | |
| Progeny P5211 E3 | Pioneer P48T22E | Terral REV 5190E |
| Terral REV 4990E | Pioneer P49T62E | Dyna-Gro S46EN29 |
| Terral REV 5190E | Progeny P5211 E3 | Pioneer P48T22E |
| USG 7479ET | GoSoy 482E18 | |

TABLE 25
Exemplary Maturity Group IV Varieties (LLGT27)

| Variety of Interest | Same Varieties as the Variety of Interest |
|---|---|
| Armor 44-Z28 | Stine 44GA00 |
| Stine 44GA00 | Armor 44-Z28 |

TABLE 26
Exemplary Maturity Group IV Varieties (Liberty Link)

| Variety of Interest | Same Varieties as the Variety of Interest | | | | | | |
|---|---|---|---|---|---|---|---|
| Armor 44-L21 | Cerdenz CZ | Delta Grow | Dyna-Gro | Croplan | NK S44-C5L | | |
| | 4548LL | DG4587LL | S44LS76 | LC4467S | | | |
| Armor 47-L10 | Stine 47LF32 | Pioneer | Croplan | Delta Grow | Pioneer 45L57 | NK S47-F6L | Cerdenz |
| | | P45T39L | LC4814 | DG4781LL | | | CZ4748LL |
| Armor 47-Z01 | Progeny | Cerdenz CZ | | | | | |
| | P4565 LR | 4539GTLL | | | | | |
| Armor 495L | Dyna-Gro | Progeny | | | | | |
| | S48LL23 | P4819 LL | | | | | |
| Cerdenz CZ | Armor 47-Z01 | Progeny | | | | | |
| 4539GTLL | | P4565 LR | | | | | |
| Cerdenz CZ | Delta Grow | Dyna-Gro | Croplan | NK S44-C5L | Armor 44-L21 | | |
| 4548LL | DG4587LL | S44LS76 | LC4467S | | | | |
| Cerdenz | Stine 40LF23 | Stine 40LF23 | | | | | |
| CZ4044LL | | | | | | | |
| Cerdenz | Dyna-Gro | | | | | | |
| CZ4222LL | S45LL97 | | | | | | |
| Cerdenz | Armor 47-L10 | Stine 47LF32 | Pioneer | Croplan | Delta Grow | Pioneer | NK S47-F6L |
| CZ4748LL | | | P45T39L | LC4814 | DG4781LL | 45L57 | |
| Cerdenz | Stine 48LI32 | Croplan | | | | | |
| CZ4820 LL | | LC4850 | | | | | |
| Cerdenz | GoSoy | Stine 51LI32 | | | | | |
| CZ4938 LL | 49L17LL | | | | | | |
| Credenz | Stine 49LH02 | | | | | | |
| CZ4918 LL | | | | | | | |
| Croplan | NK S44-C5L | Armor | Cerdenz CZ | Delta Grow | Dyna-Gro | | |
| LC4467S | | 44-L21 | 4548LL | DG4587LL | S44LS76 | | |
| Croplan | Delta Grow | Pioneer 45L57 | NK S47-F6L | Cerdenz | Armor 47-L10 | Stine | Pioneer |
| LC4814 | DG4781LL | | | CZ4748LL | | 47LF32 | P45T39L |
| Croplan | Cerdenz | Stine 48LI32 | | | | | |
| LC4850 | CZ4820 LL | | | | | | |
| Croplan | Progeny | | | | | | |
| LST4885S | P4814LLS | | | | | | |
| Delta Grow | Dyna-Gro | Croplan | NK S44-C5L | Armor 44-L21 | Cerdenz CZ | | |
| DG4587LL | S44LS76 | LC4467S | | | 4548LL | | |
| Delta Grow | Pioneer 45L57 | NK S47-F6L | Cerdenz | Armor 47-L10 | Stine | Pioneer | Croplan |
| DG4781LL | | | CZ4748LL | | 47LF32 | P45T39L | LC4814 |
| Delta Grow | NK S49-U6LS | Great Heart | Dyna-Gro | Stine 50LF32 | | | |
| DG4977LL/STS | | GT-501CLS | S49LS65 | | | | |
| Dyna-Gro | Croplan | NK S44-C5L | Armor 44-L21 | Cerdenz CZ | Delta Grow | | |
| S44LS76 | LC4467S | | | 4548LL | DG4587LL | | |
| Dyna-Gro | Cerdenz | | | | | | |
| S45LL97 | CZ4222LL | | | | | | |
| Dyna-Gro | Progeny | Armor 495L | | | | | |
| S48LL23 | P4819 LL | | | | | | |
| Dyna-Gro | GoSoy 4913LL | HBK LL4953 | Pioneer | Progeny | Stine | | |
| S49LL34 | | | P53T62L | P4930LL | 50LD02 | | |
| Dyna-Gro | Stine 50LF32 | Delta Grow | NK S49-U6LS | Great Heart | | | |
| S49LS65 | | DG4977LL/STS | | GT-501CLS | | | |
| GoSoy 4913LL | HBK LL4953 | Pioneer | Progeny | Stine 50LD02 | Dyna-Gro | | |
| | | P53T62L | P4930LL | | S49LL34 | | |
| GoSoy 49L17LL | Stine 51LI32 | Cerdenz | | | | | |
| | | CZ4938 LL | | | | | |
| Great Heart | Dyna-Gro | Stine | Delta Grow | NK S49-U6LS | | | |
| GT-501CLS | S49LS65 | 50LF32 | DG4977LL/STS | | | | |
| HBK LL4953 | Pioneer | Progeny | Stine 50LD02 | Dyna-Gro | GoSoy | | |
| | P53T62L | P4930LL | | S49LL34 | 4913LL | | |
| NK S44-C5L | Armor 44-L21 | Cerdenz CZ | Delta Grow | Dyna-Gro | Croplan | | |
| | | 4548LL | DG4587LL | S44LS76 | LC4467S | | |
| NK S47-F6L | Cerdenz | Armor 47-L10 | Stine 47LF32 | Pioneer | Croplan | Delta Grow | Pioneer |
| | CZ4748LL | | | P45T39L | LC4814 | DG4781LL | 45L57 |
| NK S49-U6LS | Great Heart | Dyna-Gro | Stine 50LF32 | Delta Grow | | | |
| | GT-501CLS | S49LS65 | | DG4977LL/STS | | | |
| Pioneer 45L57 | NK S47-F6L | Cerdenz | Armor 47-L10 | Stine 47LF32 | Pioneer | Croplan | Delta Grow |
| | | CZ4748LL | | | P45T39L | LC4814 | DG4781LL |
| Pioneer P45A29L | Terral REV | | | | | | |
| | 46L99 | | | | | | |
| Pioneer P45T39L | Croplan | Delta Grow | Pioneer 45L57 | NK S47-F6L | Cerdenz | Armor 47-L10 | Stine 47LF32 |
| | LC4814 | DG4781LL | | | CZ4748LL | | |
| Pioneer P47A76L | Terral REV | | | | | | |
| | 47L38 | | | | | | |
| Pioneer P49T31L | Terral REV | | | | | | |
| | 48L63 | | | | | | |
| Pioneer P50A78L | Terral REV | | | | | | |
| | 49L88 | | | | | | |
| Pioneer P53T62L | Progeny | Stine | Dyna-Gro | GoSoy | HBK LL4953 | | |
| | P4930LL | 50LD02 | S49LL34 | 4913LL | | | |
| Progeny | Cerdenz CZ | Armor | | | | | |
| P4565 LR | 4539GTLL | 47-Z01 | | | | | |
| Progeny | Croplan | | | | | | |
| P4814LLS | LST4885S | | | | | | |
| Progeny | Armor 495L | Dyna-Gro | | | | | |
| P4819 LL | | S48LL23 | | | | | |
| Progeny | Stine 50LD02 | Dyna-Gro | GoSoy | HBK LL4953 | Pioneer | | |
| P4930LL | | S49LL34 | 4913LL | | P53T62L | | |
| Stine 40LF23 | Cerdenz | | | | | | |
| | CZ4044LL | | | | | | |
| Stine 47LF32 | Pioneer | Croplan | Delta Grow | Pioneer | NK S47-F6L | Cerdenz | Armor 47-L10 |
| | P45T39L | LC4814 | DG4781LL | 45L57 | | CZ4748LL | |
| Stine 48LI32 | Croplan | Cerdenz | | | | | |
| | LC4850 | CZ4820 LL | | | | | |
| Stine 49LH02 | Credenz | | | | | | |
| | CZ4918 LL | | | | | | |
| Stine 50LD02 | Dyna-Gro | GoSoy | HBK LL4953 | Pioneer | Progeny | | |
| | S49LL34 | 4913LL | | P53T62L | P4930LL | | |
| Stine 50LF32 | Delta Grow | NK S49-U6LS | Great Heart | Dyna-Gro | | | |
| | DG4977LL/STS | | GT-501CLS | S49LS65 | | | |
| Stine 51LI32 | Cerdenz | GoSoy | | | | | |
| | CZ4938 LL | 49L17LL | | | | | |
| Terral REV 46L99 | Pioneer P45A29L | | | | | | |
| Terral REV 47L38 | Pioneer P47A76L | | | | | | |
| Terral REV 48L63 | Pioneer P49T31L | | | | | | |
| Terral REV 49L88 | Pioneer P50A78L | | | | | | |

TABLE 27
Exemplary Maturity Group IV Varieties (RR1/RR2Y)

| Variety of Interest | Same Varieties as the Variety of Interest | | |
|---|---|---|---|
| AgVenture 48E3RR | Terral REV 49R94 | | |
| Armor 44-R08 | Progeny P4211RY | Dyna-Gro 39RY43 | Croplan R2C4391 |
| Armor 47-R70 | Progeny P4757RY | Delta Grow | Croplan R2C4775 |
| | | DG4790GENRR2Y | |
| Armor 49-R44 | Croplan R2C4914S | | |
| Croplan R2C4391 | Armor 44-R08 | Progeny P4211RY | Dyna-Gro 39RY43 |
| Croplan R2C4775 | Armor 47-R70 | Progeny P4757RY | Delta Grow |
| | | | DG4790GENRR2Y |
| Croplan R2C4914S | Armor 49-R44 | | |
| Delta Grow | Croplan R2C4775 | Armor 47-R70 | Progeny P4757RY |
| DG4790GENRR2Y | | | |
| Dyna-Gro 39RY43 | Croplan R2C4391 | Armor 44-R08 | Progeny P4211RY |
| Dyna-Gro S43RY95 | Mycogen 5N433R2 | | |
| Dyna-Gro S49RY25 | Great Heart GT516CR2 | | |
| Great Heart GT516CR2 | Dyna-Gro S49RY25 | | |
| Mycogen 5N433R2 | Dyna-Gro S43RY95 | | |
| Progeny P4211RY | Dyna-Gro 39RY43 | Croplan R2C4391 | Armor 44-R08 |
| Progeny P4757RY | Delta Grow | Croplan R2C4775 | Armor 47-R70 |
| | DG4790GENRR2Y | | |
| Terral REV 49R94 | AgVenture 48E3RR | | |
| AgVenture 48E3RR | Terral REV 49R94 | | |
| Armor 44-R08 | Progeny P4211RY | Dyna-Gro 39RY43 | Croplan R2C4391 |
| Armor 47-R70 | Progeny P4757RY | Delta Grow | Croplan R2C4775 |
| | | DG4790GENRR2Y | |
| Armor 49-R44 | Croplan R2C4914S | | |
| Croplan R2C4391 | Armor 44-R08 | Progeny P4211RY | Dyna-Gro 39RY43 |
| Croplan R2C4775 | Armor 47-R70 | Progeny P4757RY | Delta Grow |
| | | | DG4790GENRR2Y |
| Croplan R2C4914S | Armor 49-R44 | | |
| Delta Grow | Croplan R2C4775 | Armor 47-R70 | Progeny P4757RY |
| DG4790GENRR2Y | | | |
| Dyna-Gro 39RY43 | Croplan R2C4391 | Armor 44-R08 | Progeny P4211RY |
| Dyna-Gro S43RY95 | Mycogen 5N433R2 | | |
| Dyna-Gro S49RY25 | Great Heart GT516CR2 | | |
| Great Heart GT516CR2 | Dyna-Gro S49RY25 | | |
| Mycogen 5N433R2 | Dyna-Gro S43RY95 | | |
| Progeny P4211RY | Dyna-Gro 39RY43 | Croplan R2C4391 | Armor 44-R08 |
| Progeny P4757RY | Delta Grow | Croplan R2C4775 | Armor 47-R70 |
| | DG4790GENRR2Y | | |
| Terral REV 49R94 | AgVenture 48E3RR | | |

TABLE 28
Exemplary Maturity Group IV Varieties (Xtend)

| Variety of Interest | Same Varieties as the Variety of Interest | | | | | | |
|---|---|---|---|---|---|---|---|
| AgVenture 47W2X | Terral REV 4857X | | | | | | |
| Armor 42-D27 | Dyna-Gro S41XS98 | | | | | | |
| Armor 44-D40 | Dyna-Gro S44XS57 | Local Seed | | | | | |
| | | LS4458XS | | | | | |
| Armor 46-D08 | Croplan RX4516S | Progeny | Local | Dyna-Gro | MorSoy 4616 | | |
| | | P4620RXS | LS4565XS | S45XS37 | RXT | | |
| Armor 47-D17 | Progeny P4516RXS | Dyna-Gro | Croplan | | | | |
| | | S45XS66 | RX4555S | | | | |
| Armor 47-D93 | Mission Seed | | | | | | |
| | A4657NSXR2 | | | | | | |
| Armor 48-D02 | Mission Seed A4828X | | | | | | |
| Armor 48-D24 | Hefty H48X7 | Local Seed | MorSoy 4846 | Progeny | Dyna-Gro | Delta Grow | Croplan |
| | | LS4966X | RXT | P4816RX | S48XT56 | DG48X45 | RX4825 |
| Armor 48-D87 | Croplan RX4927 | | | | | | |
| Armor 49-D13 | Mission Seed A4950X | | | | | | |
| Armor 49-D14 | Dyna-Gro S48XT90 | | | | | | |
| Cerdenz CZ4869X | Local Seed LS4677X | | | | | | |
| Credenz CZ 4730X | Dyna-Gro S47XT20 | | | | | | |
| Croplan RX4516S | Progeny P4620RXS | Local LS4565XS | Dyna-Gro | MorSoy 4616 | Armor 46-D08 | | |
| | | | S45XS37 | RXT | | | |
| Croplan RX4555S | Armor 47-D17 | Progeny | Dyna-Gro | | | | |
| | | P4516RXS | S45XS66 | | | | |
| Croplan RX4817S | Dyna-Gro S48XS78 | Mission Seed | | | | | |
| | | A4847NSXR2 | | | | | |
| Croplan RX4825 | Armor 48-D24 | Hefty H48X7 | Local Seed | MorSoy 4846 | Progeny | Dyna-Gro | Delta Grow |
| | | | LS4966X | RXT | P4816RX | S48XT56 | DG48X45 |
| Croplan RX4926 | Dyna-Gro S49XT07 | | | | | | |
| Croplan RX4927 | Armor 48-D87 | | | | | | |
| Delta Grow | Croplan RX4825 | Armor 48-D24 | Hefty H48X7 | Local Seed | MorSoy 4846 | Progeny | Dyna-Gro |
| DG48X45 | | | | LS4966X | RXT | P4816RX | S48XT56 |
| Dyna-Gro S41XS98 | Armor 42-D27 | | | | | | |
| Dyna-Gro S43XS27 | Mission Seed | | | | | | |
| | A4637NSXR2 | | | | | | |
| Dyna-Gro S44XS57 | Armor 44-D40 | Local Seed | | | | | |
| | | LS4458XS | | | | | |
| Dyna-Gro S45XS37 | MorSoy 4616 RXT | Armor 46-D08 | Croplan | Progeny | Local | | |
| | | | RX4516S | P4620RXS | LS4565XS | | |
| Dyna-Gro S45XS66 | Croplan RX4555S | Armor 47-D17 | Progeny | | | | |
| | | | P4516RXS | | | | |
| Dyna-Gro S46XS60 | Local Seed LS4795XS | | | | | | |
| Dyna-Gro S47XT20 | Credenz CZ 4730X | | | | | | |
| Dyna-Gro S48XS78 | Mission Seed | Croplan RX4817S | | | | | |
| | A4847NSXR2 | | | | | | |
| Dyna-Gro S48XT56 | Delta Grow DG48X45 | Croplan RX4825 | Armor 48-D24 | Hefty H48X7 | Local Seed | MorSoy 4846 | Progeny |
| | | | | | LS4966X | RXT | P4816RX |
| Dyna-Gro S48XT90 | Armor 49-D14 | | | | | | |
| Dyna-Gro S49XS76 | Hefty H49X7S | Progeny | USG | | | | |
| | | P5016RXS | 7496XTS | | | | |
| Dyna-Gro S49XT07 | Croplan RX4926 | | | | | | |
| Hefty H48X7 | Local Seed LS4966X | MorSoy 4846 | Progeny | Dyna-Gro | Delta Grow | Croplan | Armor 48- |
| | | RXT | P4816RX | S48XT56 | DG48X45 | RX4825 | D24 |
| Hefty H49X7S | Progeny P5016RXS | USG 7496XTS | Dyna-Gro | | | | |
| | | | S49XS76 | | | | |
| Local LS4565XS | Dyna-Gro S45XS37 | MorSoy 4616 | Armor 46-D08 | Croplan | Progeny | | |
| | | RXT | | RX4516S | P4620RXS | | |
| Local Seed | Armor 44-D40 | Dyna-Gro | | | | | |
| LS4458XS | | S44XS57 | | | | | |
| Local Seed | Cerdenz CZ4869X | | | | | | |
| LS4677X | | | | | | | |
| Local Seed | Dyna-Gro S46XS60 | | | | | | |
| LS4795XS | | | | | | | |
| Local Seed | MorSoy 4846 RXT | Progeny P4816RX | Dyna-Gro | Delta Grow | Croplan | Armor 48-D24 | Hefty H48X7 |
| LS4966X | | | S48XT56 | DG48X45 | RX4825 | | |
| Mission Seed | MorSoy 4447 RXT | Progeny | | | | | |
| A4448X | | P4444RXS | | | | | |
| Mission Seed | Progeny P4570RXS | | | | | | |
| A4618X | | | | | | | |
| Mission Seed | Dyna-Gro S43XS27 | | | | | | |
| A4637NSXR2 | | | | | | | |
| Mission Seed | Armor 47-D93 | | | | | | |
| A4657NSXR2 | | | | | | | |
| Mission Seed | Armor 48-D02 | | | | | | |
| A4828X | | | | | | | |
| Mission Seed | Croplan RX4817S | Dyna-Gro | | | | | |
| A4847NSXR2 | | S48XS78 | | | | | |
| Mission Seed | Armor 49-D13 | | | | | | |
| A4950X | | | | | | | |
| MorSoy 4447 RXT | Progeny P4444RXS | Mission Seed | | | | | |
| | | A4448X | | | | | |
| MorSoy 4616 RXT | Armor 46-D08 | Croplan RX4516S | Progeny | Local | Dyna-Gro | | |
| | | | P4620RXS | LS4565XS | S45XS37 | | |
| MorSoy 4846 RXT | Progeny P4816RX | Dyna-Gro | Delta Grow | Croplan | Armor 48-D24 | Hefty H48X7 | Local Seed |
| | | S48XT56 | DG48X45 | RX4825 | | | LS4966X |
| Progeny P4444RXS | Mission Seed A4448X | MorSoy 4447 | | | | | |
| | | RXT | | | | | |
| Progeny P4516RXS | Dyna-Gro S45XS66 | Croplan RX4555S | Armor 47-D17 | | | | |
| Progeny P4570RXS | Mission Seed A4618X | | | | | | |
| Progeny P4620RXS | Local LS4565XS | Dyna-Gro | MorSoy 4616 | Armor 46-D08 | Croplan | | |
| | | S45XS37 | RXT | | RX4516S | | |
| Progeny P4816RX | Dyna-Gro S48XT56 | Delta Grow | Croplan | Armor 48-D24 | Hefty H48X7 | Local Seed | MorSoy 4846 |
| | | DG48X45 | RX4825 | | | LS4966X | RXT |
| Progeny P5016RXS | USG 7496XTS | Dyna-Gro | Hefty H49X7S | | | | |
| | | S49XS76 | | | | | |
| Terral REV 4857X | AgVenture 47W2X | | | | | | |
| USG 7496XTS | Dyna-Gro S49XS76 | Hefty H49X7S | Progeny | | | | |
| | | | P5016RXS | | | | |

TABLE 29
Exemplary Maturity Group V Varieties (Liberty Link)

Variety of

| Interest | Same Varieties as the Variety of Interest | | | |
|---|---|---|---|---|
| Armor 501L | GoSoy 4912 LL | Dyna-Gro | Delta Grow | Pioneer P95L01 |
| | | S50LL25 | DG4967LL | |
| Cerdenz | Croplan LCS215 | Dyna-Gro | Stine 51LE20 | Delta Grow |
| CZ5242LL | | S52LL66 | | DG5067LL |
| Croplan | Dyna-Gro | GoSoy 5515 LL | Progeny | |
| L5T5555S | S55LS75 | | P5414LLS | |
| Croplan LCS215 | Dyna-Gro | Stine 51LE20 | Delta Grow | Cerdenz |
| | S52LL66 | | DG5067LL | CZ5242LL |
| Delta Grow | Pioneer P95L01 | Armor 501L | GoSoy 4912 LL | Dyna-Gro |
| DG4967LL | | | | S50LL25 |
| Delta Grow | Cerdenz | Croplan LCS215 | Dyna-Gro | Stine 51LE20 |
| DG5067LL | CZ5242LL | | S52LL66 | |
| Dyna-Gro | Delta Grow | Pioneer P95L01 | Armor 501L | GoSoy 4912 LL |
| S50LL25 | DG4967LL | | | |
| Dyna-Gro | Stine 51LE20 | Delta Grow | Cerdenz | Croplan LCS215 |
| S52LL66 | | DG5067LL | CZ5242LL | |
| Dyna-Gro | GoSoy 5515 LL | Progeny | Croplan | |
| S55LS75 | | P5414LLS | L5T5555S | |
| GoSoy 4912 LL | Dyna-Gro | Delta Grow | Pioneer P95L01 | Armor 501L |
| | S50LL25 | DG4967LL | | |
| GoSoy 5515 LL | Progeny | Croplan | Dyna-Gro | |
| | P5414LLS | L5T5555S | S55LS75 | |
| Pioneer P52A43L | Terral REV | | | |
| | 54L18 | | | |
| Pioneer P95L01 | Armor 501L | GoSoy 4912 LL | Dyna-Gro | Delta Grow |
| | | | S50LL25 | DG4967LL |
| Progeny | Croplan | Dyna-Gro | GoSoy 5515 LL | |
| P5414LLS | L5T5555S | S55LS75 | | |
| Stine 51LE20 | Delta Grow | Cerdenz | Croplan LCS215 | Dyna-Gro |
| | DG5067LL | CZ5242LL | | S52LL66 |
| Terral REV | Pioneer P52A43L | | | |
| 54L18 | | | | |

TABLE 30
Exemplary Maturity Group V Varieties (RR1/RR2Y)

| Variety of Interest | Same Varieties as the Variety of Interest | | |
|---|---|---|---|
| Ag Venture 48E3RR | Terral REV 49R94 | | |
| Armor 55-R68 | Delta Grow | | |
| | DG5580GENRR2Y | | |
| Armor 55-R68 | Delta Grow DG5580 GEN | | |
| | RR2Y | | |
| Armor 57-R17 | Dyna-Gro S56RY84 | Progeny | Croplan |
| | | P5555RY | R2C5673 |
| Croplan R2C5225S | Progeny P5226RYS | | |
| Croplan R2C5265 | Dyna-Gro S52RY75 | | |
| Croplan R2C5656 | Progeny P5752RY | | |
| Croplan R2C5673 | Armor 57-R17 | Dyna-Gro | Progeny |
| | | S56RY84 | P5555RY |
| Delta Grow DG5580 GEN | Armor 55-R68 | | |
| RR2Y | | | |
| Delta Grow | Armor 55-R68 | | |
| DG5580GENRR2Y | | | |
| Dyna-Gro S52RY75 | Croplan R2C5265 | | |
| Dyna-Gro S56RY84 | Progeny P5555RY | Croplan | Armor 57-R17 |
| | | R2C5673 | |
| Progeny P5226RYS | Croplan R2C5225S | | |
| Progeny P5555RY | Croplan R2C5673 | Armor 57-R17 | Dyna-Gro |
| | | | S56RY84 |
| Progeny P5752RY | Croplan R2C5656 | | |
| Terral REV 49R94 | AgVenture 48E3RR | | |

TABLE 31
Exemplary Maturity Group V Varieties (Xtend)

| Variety of Interest | Same Varieties as the Variety of Interest |
|---|---|
| Croplan RX5667 | Progeny P5688RX |
| Progeny P5688RX | Croplan RX5667 |

[0698] As can be seen from the above tables, the soybean varieties that are applicable for the genomic architecture edits of the present disclosure may include both conventional and genetically modified varieties. A multitude of genetic events can be utilized in the host soybean genomic background (e.g. the events contained in the GMO soybean of the aforementioned tables), in combination with the genetic edits taught herein associated with the recombinant production of proteins and/or any of the various constructs taught herein. Further, although MG 4 and MG 5 varieties have been illustrated above, the disclosure is applicable to all soybean maturity groups.

### EXAMPLES

[0699] The following examples are given for the purpose of illustrating various embodiments of the disclosure and are not meant to limit the present disclosure in any fashion. Changes therein and other uses which are encompassed within the spirit of the disclosure, as defined by the scope of the claims, will be recognized by those skilled in the art

[0700] The following experiments demonstrate different recombinant fusion constructs comprising a milk protein (e.g., a casein) and at least one other protein, as well as methods of producing and testing the fusion proteins. While the examples below describe expression in soybean, it will be understood by those skilled in the art that the constructs and methods disclosed herein may be tailored for expression in any organism.

[0701] The following examples also demonstrate the production of various cheese compositions and characterization of their properties. Traditionally cheese is made from milk, which comprises a mixture of casein proteins. To test whether a cheese composition having acceptable organoleptic and physical properties could be made using only one casein protein, or different combinations/ratios of casein proteins as compared to that found in any mammalian milk, various experiments described below were performed. While the examples below utilize isolated caseins isolated from bovine milk, it will be understood by those skilled in the art that the recipes and methods disclosed herein may be tailored for use with other isolated caseins and recombinant caseins, including caseins expressed in a plant.

### Example 1: Construction of Expression Vectors for Plant Transformation for Stable Expression of Recombinant Fusion Proteins

### Binary Vector Design

[0702] While a number of vectors may be utilized for expression of the fusion proteins disclosed herein, the example constructs described below were built in the binary pCAMBIA3300 (Creative Biogene, VET1372) vector, which was customized for soybean transformation and selection. In order to modify the vector, pCAMBIA3300 was digested with HindIII and AseI allowing the release of the vector backbone (LB T-DNA repeat_KanR_pBR322 oripBR322 bom_pVS1 oriV_pVsl repA_pVS1 StaA_RB T-DNA repeat). The 6598 bp vector backbone was gel extracted and a synthesized multiple cloning site (MCS) was ligated via In-Fusion cloning (In-Fusion® HD Cloning System CE, available on the world wide web at clontech.com) to allow modular vector modifications. A cassette containing the Arabidopsis thaliana Csr1.2 gene for acetolactate synthase was added to the vector backbone to be used as a marker for herbicide selection of transgenic plants. In order to build this cassette, the regulatory sequences from Solanum tuberosum ubiquitin/ribosomal fusion protein promoter (StUbi3 prom; −1 to −922 bp) and terminator (StUbi3 term; 414 bp) (GenBank accession no. L22576.1) were fused to the mutant (S653N) acetolactate synthase gene (Csr1.2; GenBank accession no. X51514.1) (Sathasivan et al, 1990; Ding et al, 2006) to generate imazapyr-resistant traits in soybean plants. The selectable marker cassette was introduced into the digested (EcoRI) modified vector backbone via In-Fusion cloning to form vector pAR15-00 (FIG. 3).

[0703] Recombinant DNA constructs were designed to express milk proteins in transgenic plants. The coding regions of the expression cassettes outlined below contain a fusion of codon-optimized nucleic acid sequences encoding bovine milk proteins, or a functional fragment thereof. To enhance protein expression in soybean, the nucleic acid sequences encoding β-lactoglobulin (GenBank accession no. X14712.1), κ-casein (GenBank accession no. CAA25231), β-casein (GenBank accession no. M15132.1), and aS1-casein (GenBank accession no. X59836.1) were codon optimized using Glycine max codon bias and synthesized (available on the world wide web at idtdna.com/CodonOpt). The signal sequences were removed (i.e., making the constructs “truncated”) and the new versions of the genes were renamed as OLG1 (0-lactoglobulin version 1, SEQ ID NO: 9), OLG2 (0-lactoglobulin version 2, SEQ ID NO: 11), OLG3 (0-lactoglobulin version 3, SEQ ID NO: 12), OLG4 (0-lactoglobulin version 4, SEQ ID NO: 13), OKC1-T (Optimized κ-casein Truncated version 1, SEQ ID NO: 3), paraOKC1-T (only the para-κportion of OKC1-T, SEQ ID NO: 1), OBC-T2 (Optimized β-casein Truncated version 2, SEQ ID NO: 5), and OaS1-T (Optimized aS1-casein Truncated version 1, SEQ ID NO: 7). As will be understood by those skilled in the art, codon optimized nucleic acid sequences can present from about 60% to about 100% identity to the native version of the nucleic acid sequence.

[0704] All the expression cassettes described below and shown in FIG. 4-FIG. 9 contained codon-optimized nucleic acid sequences encoding bovine milk proteins, or a functional fragment thereof, a seed specific promoter, a 5′UTR, a signal sequence (Sig) that directs foreign proteins to the protein storage vacuoles, and a termination sequence. In some versions of the constructs a linker such as a linker comprising a chymosin cleavage site (FM), was placed between the two proteins and/or a C-terminal KDEL sequence for ER retention was included. Expression cassettes were inserted in the pAR15-00 vector described above utilizing a KpnI restriction site with the MCS (FIG. 3). Coding regions and regulatory sequences are indicated as blocks (not to scale) in FIG. 4-FIG. 9.

κ-casein-β-lactoglobulin fusion with KDEL

[0705] Shown in FIG. 4 is an example expression cassette comprising κ-casein (OKC1-T, SEQ ID NO: 3) and β-lactoglobulin (OLG1, SEQ ID NO: 9). The regulatory sequences that were used in order to produce the heterologous milk proteins in soybean seeds include the promoter of the beta-phaseolin storage protein gene (PvPhas prom; −1 to −1543; GenBank accession no. J01263.1, SEQ ID NO: 18); the 5′UTR of the arc5-1 gene (arc5′UTR; −1 to −13; GenBank accession no. Z50202, SEQ ID NO: 20) (De Jaeger et al, 2002); the signal peptide of Lectin 1 gene 1 (sig10; +1 to +93; GenBank accession no. Glyma.02G012600, SEQ ID NO: 14) (Darnowski et al, 20020); and, the 3′UTR of the arc5-1 gene, (arc term 1197 bp; GenBank accession no. Z50202.1, SEQ ID NO: 21)(De Jaeger et al, 2002). A C-terminal KDEL (SEQ ID NO: 23) was also included for ER retention.

β-casein-β-lactoglobulin fusion with linker

[0706] Shown in FIG. 5 is an example expression cassette comprising β-casein (OBC-T2, SEQ ID NO: 5) and β-lactoglobulin (OLG1, SEQ ID NO: 9). The regulatory sequences that were used in order to produce the heterologous milk proteins in soybean seeds include the promoter of the beta-phaseolin storage protein gene (PvPhas prom; −1 to −1543; GenBank accession no. J01263.1, SEQ ID NO: 18); the 5′UTR of the arc5-1 gene (arc5′UTR; −1 to −13; GenBank accession no. Z50202, SEQ ID NO: 20) (De Jaeger et al, 2002); the signal peptide of Lectin 1 gene 1 (sig10; +1 to +93; accession no. Glyma.02G012600, SEQ ID NO: 14) (Darnowski et al, 2002); and, the 3′UTR of the arc5-1 gene, (arc term 1197 bp; accession no. Z50202.1, SEQ ID NO: 21) (De Jaeger, et al 2002). A linker comprising a chymosin cleavage site (FM) was inserted between the two proteins.

αS1-casein-β-lactoglobulin fusion with linker

[0707] Shown in FIG. 6 is an example expression cassette comprising αS1-casein (OaS1-T, SEQ ID NO: 7) and β-lactoglobulin (OLG1, SEQ ID NO: 9). The regulatory sequences that were used in order to produce the heterologous milk proteins in soybean seeds include the promoter of the beta-phaseolin storage protein gene (PvPhas prom; −1 to −1543; GenBank accession no. J01263.1, SEQ ID NO: 18); the 5′UTR of the arc5-1 gene (arc5′UTR; −1 to −13; GenBank accession no. Z50202, SEQ ID NO: 20) (De Jaeger et al, 2002); the signal peptide of Lectin 1 gene 1 (sig10; +1 to +93; accession no. Glyma.02G012600, SEQ ID NO: 14) (Darnowski et al, 2002); and, the 3′UTR of the arc5-1 gene, (arc term 1197 bp; GenBank accession no. Z50202.1, SEQ ID NO: 21)(De Jaeger et al, 2002). A linker comprising a chymosin cleavage site (FM) was inserted between the two proteins.

Para-κ-casein-β-lactoglobulin fusion with linker and KDEL

[0708] Shown in FIG. 7 is an example expression cassette comprising para-κ-casein (paraOKC1-T, SEQ ID NO: 1) and β-lactoglobulin (OLG1, SEQ ID NO: 9). The regulatory sequences that were used in order to produce the heterologous milk proteins in soybean seeds include the promoter of the beta-phaseolin storage protein gene (PvPhas prom; −1 to −1543; GenBank accession no. J01263.1, SEQ ID NO: 18); the 5′UTR of the arc5-1 gene (arc5′UTR; −1 to −13; GenBank accession no. Z50202, SEQ ID NO: 20) (De Jaeger et al, 2002); the signal peptide of Lectin 1 gene 1 (sig10; +1 to +93; GenBank accession no. Glyma.02G012600, SEQ ID NO: 14) (Darnowski et al, 2002); and, the 3′UTR of the arc5-1 gene, (arc term 1197 bp; GenBank accession no. Z50202.1, SEQ ID NO: 21) (De Jaeger et al 2002). A linker comprising a chymosin cleavage site (FM) was inserted between the two proteins and a C-terminal KDEL (SEQ ID NO: 23) was also included for ER retention.

Para-κ-casein-β-lactoglobulin fusion with linker

[0709] Shown in FIG. 8 is an example expression cassette comprising para-κ-casein (paraOKC1-T, SEQ ID NO: 1) and β-lactoglobulin (OLG1, SEQ ID NO: 9). The regulatory sequences that were used in order to produce the heterologous milk proteins in soybean seeds include the promoter of the beta-phaseolin storage protein gene (PvPhas prom; −1 to −1543; GenBank accession no. J01263.1, SEQ ID NO: 18); the 5′UTR of the arc5-1 gene (arc5′UTR; −1 to −13; GenBank accession no. Z50202, SEQ ID NO: 20) (De Jaeger et al, 2002); the signal peptide of Lectin 1 gene 1 (sig10; +1 to +93; GenBank accession no. Glyma.02G012600, SEQ ID NO: 14) (Darnowski et al, 2002); and, the 3′UTR of the arc5-1 gene, (arc term 1197 bp; GenBank accession no. Z50202.1, SEQ ID NO: 21) (De Jaeger et al, 2002). A linker comprising a chymosin cleavage site (FM) was inserted between the two proteins.

Fusion protein with Seed2 Promoter, Sig2 and nopaline synthase terminator

[0710] Shown in FIG. 9 is an example expression cassette comprising κ-casein (OKC1-T, SEQ ID NO: 3) and β-lactoglobulin (OLG1, SEQ ID NO: 9). The regulatory sequences that were used in order to produce the heterologous milk proteins in soybean seeds include the promoter and signal peptide of glycinin 1 (GmSeed2 (SEQ ID NO: 19):sig2 (SEQ ID NO: 16)) followed by the ER retention signal (KDEL) and the Nopaline synthase termination sequence (nos term, SEQ ID NO: 22).

### Exemplary Protein Co-expression Vector

[0711] Binary pCAMBIA3300 vectors individually encoding for: (1) a prolamin (e.g., Canein or Zein); (2) a milk protein (e.g., Casein); or (3) both a prolamin and a milk protein are generated to co-express a milk protein and prolamin in plant cells (See FIG. 26A-26G, FIG. 27). Co-expression of a milk protein and prolamin will result in generation of a protein body in the plant cell capable of shielding the milk protein from degradation or capable of reducing toxicity, if any, associated with recombinant expression of the milk protein in the plant cell.

Exemplary DNA constructs encoding fusion proteins

[0712] Exemplary fusion protein constructs are shown in Table 32 and summarized below.

Construct 1: Beta-casein-FM-AlphaS1-casein-FM-AlphaS1-casein-FM-Beta-casein

[0713] ARDV-02 contains the binary pCAMBIA3300 base vector with features such as the right border repeat from nopaline C58 T-DNA, (RB-T-DNA repeat) the stability protein from Pseudomonas plasmid pVS1 (pVS1 StaA), the replication protein from Pseudomonas plasmid pVS1 (pVS1 repA), origin of replication for the Pseudomonas plasmid pVS1 (pVS1 oriV), the basis of mobility region from pBR322 (bom), high-copy-number ColEl/pMB1/pBR322/pUC origin of replication (ori), aminoglycoside phosphotransferase which confers resistance to kanamycin, and the left border repeat from nopaline C58 T-DNA (LB-T-DNA repeat). Additionally, ARDV-02 contains the plant selection marker cassette (StUbi3P:Csr1StUbi3T) which confers resistance to imazapyr, and the cassette with the genes of interest (GmSeed2:sig2:OBC-T4:FM:OaS1-T2:FM:OaS1-T:FM:OBC-T2:AtHSP T:AtUbi10T) which are located between the LB and RB T-DNA repeats.
[0714] Organism: Glycine Max.
[0715] Mode of transformation: Agrobacterium tumefaciens, disarmed.
[0716] Phenotype description Herbicide Tolerance—imazapyr resistant; Product Quality −[Storage protein altered].

### AHAS Selection Marker Cassette

[0717] Genotype: Selection Marker
[0718] Promoter: [StUbi3P]; Donor: [Solanum tuberosum]; Description: [ubiquitin 3 gene to promote expression of imazapyr resistance gene].
[0719] Gene: [CSR1]; Donor: [Arabidopsis thaliana]; Description: [confer resistance to imazapyr for selection of transgenic events].
[0720] Terminator: Name: [StUbi3T]; Donor: [Solanum tuberosum]; Description: [ubiquitin 3 gene for CSR1 transcription stabilization].

[0721] An exemplary sequence for the selection marker comprises SEQ ID NO: 905.

### Gene of Interest

[0722] Promoter: Name: [GmSeed2]; Donor: [Glycine max]; Description: [Promoter from the 5′ region of glycinin Gy1 to promote expression of gene of interest in soybean seed].

[0723] Signal Peptide: Name: [sig2]; Donor: [Glycine max]; Description: [Glycinin G1N-terminal peptide to localize heterologous protein].

[0724] Gene: Name: [OBC-T4:FM:OaS1-T2:FM:OaS1-T:FM:OBC-T2]; Donor:[Bos taurus] Description: [Soybean codon-optimized bovine beta-casein from Bos taurus encoding casein protein tagged with two amino acids (amino acids 126-127) from soybean codon-optimized bovine kappa-casein from Bos taurus encoding a native chymosin cleavage site, tagged with soybean codon-optimized bovine alphaS1-casein from Bos taurus encoding casein protein, tagged with two amino acids (amino acids 126-127) from soybean codon-optimized bovine kappa-casein from Bos taurus encoding a native chymosin cleavage site, tagged with soybean codon-optimized bovine alpha-casein from Bos taurus encoding casein protein, tagged with two amino acids (amino acids 126-127) from soybean codon-optimized bovine kappa-casein from Bos taurus encoding a native chymosin cleavage site, tagged with soybean codon-optimized bovine beta-casein from Bos taurus encoding casein protein].

[0725] Terminator: Name: [AtHSP_T:AtUbi10_T]; Donor: [Arabidopsis thaliana]; Description: [Heat shock termination sequence from Arabidopsis thaliana followed by ubiquitin 10 termination sequence from Arabidopsis thaliana to stabilize gene of interest transcript].

### Construct 2: Beta-casein-Beta-casein-Kappa-casein-Beta-lactoglobulin

[0726] ARDV-11 contains the binary pCAMBIA3300 base vector with features such as the right border repeat from nopaline C58 T-DNA, (RB-T-DNA repeat) the stability protein from Pseudomonas plasmid pVS1 (pVS1 StaA), the replication protein from Pseudomonas plasmid pVS1 (pVS1 repA), origin of replication for the Pseudomonas plasmid pVS1 (pVS1 oriV), the basis of mobility region from pBR322 (bom), high-copy-number ColEl/pMB1/pBR322/pUC origin of replication (ori), aminoglycoside phosphotransferase which confers resistance to kanamycin, and the left border repeat from nopaline C58 T-DNA (LB-T-DNA repeat). Additionally, ARDV-11 contains the plant selection marker cassette (StUbi3P:Csr1StUbi3T) which confers resistance to imazapyr, and the cassette with the genes of interest (GmSeed2:sig2:OBC-T3:OBC-T2:OKC1-T:OLG1:AtHSP T:AtUbi10T) which are located between the LB and RB T-DNA repeats.
[0727] Organism: Glycine Max
[0728] Mode of transformation: [Agrobacterium tumefaciens, disarmed].
[0729] Phenotype description: Herbicide Tolerance—imazapyr resistant; Product Quality-[Storage protein altered].

### AHAS Selection Marker Cassette

[0730] Genotype: Selection Marker Promoter: [StUbi3P]; Donor: [Solanum tuberosum]; Description: [ubiquitin 3 gene to promote expression of imazapyr resistance gene].
[0731] Gene: [CSR1]; Donor: [Arabidopsis thaliana]; Description: [confer resistance to imazapyr for selection of transgenic events].
[0732] Terminator: Name: [StUbi3T]; Donor: [Solanum tuberosum]; Description: [ubiquitin 3 gene for CSR1 transcription stabilization].

[0733] SEQ ID NO: 907 shows a nucleic acid sequence for an exemplary selection marker.

### Gene(s) of Interest

[0734] Promoter: Name: [GmSeed2]; Donor: [Glycine max]; Description: [Promoter from the 5′ region of glycinin Gy1 to promote expression of gene of interest in soybean seed].
[0735] Signal Peptide: Name: [sig2]; Donor: [Glycine max]; Description: [Glycinin G1 N-terminal peptide to localize heterologous protein].
[0736] Gene: Name:[OBC-T3:OBC-T2:OKC1-T:OLG1]; Donor:[Bos taurus]; Description: [Soybean codon-optimized bovine beta-casein from Bos taurus encoding casein protein tagged with soybean codon-optimized bovine beta-casein from Bos taurus encoding casein protein, tagged with soybean codon-optimized bovine kappa-casein from Bos taurus encoding casein protein, and tagged with soybean codon-optimized beta-lactoglobulin from Bos taurus encoding whey protein].
[0737] Terminator: Name: [AtHSP_T:AtUbi10_T]; Donor: [Arabidopsis thaliana]; Description: [Heat shock termination sequence from Arabidopsis thaliana followed by ubiquitin 10 termination sequence from Arabidopsis thaliana to stabilize gene of interest transcript].

### Construct 3: Beta-casein-Beta-casein-Beta-casein-Beta-casein

[0738] ARDV-12 contains the binary pCAMBIA3300 base vector with features such as the right border repeat from nopaline C58 T-DNA, (RB-T-DNA repeat) the stability protein from Pseudomonas plasmid pVS1 (pVS1 StaA), the replication protein from Pseudomonas plasmid pVS1 (pVS1 repA), origin of replication for the Pseudomonas plasmid pVS1 (pVS1 oriV), the basis of mobility region from pBR322 (bom), high-copy-number ColEl/pMB1/pBR322/pUC origin of replication (ori), aminoglycoside phosphotransferase which confers resistance to kanamycin, and the left border repeat from nopaline C58 T-DNA (LB-T-DNA repeat). Additionally, ARDV-12 contains the plant selection marker cassette (StUbi3P:Csr1StUbi3T) which confers resistance to imazapyr, and the cassette with the genes of interest (GmSeed2:sig2:OBC-T5:OBC-T4:OBC-T3:OBC-T2:AtHSP T:AtUbi10T) which are located between the LB and RB T-DNA repeats.
[0739] Organism: Glycine Max
[0740] Mode of transformation: [Agrobacterium tumefaciens, disarmed]
[0741] Phenotype description: Herbicide Tolerance—imazapyr resistant; Product Quality-[Storage protein altered]

### AHAS Selection Marker Cassette

[0742] Genotype: Selection Marker comprises the sequence of SEQ ID NO: 909.
[0743] Promoter: [StUbi3P]; Donor: [Solanum tuberosum]; Description: [ubiquitin 3 gene to promote expression of imazapyr resistance gene].
[0744] Gene: [CSR1]; Donor: [Arabidopsis thaliana]; Description: [confer resistance to imazapyr for selection of transgenic events].
[0745] Terminator: Name: [StUbi3T]; Donor: [Solanum tuberosum]; Description: [ubiquitin 3 gene for CSR1 transcription stabilization].

### Gene(s) of Interest

[0746] Promoter: Name: [GmSeed2]; Donor: [Glycine max]; Description: [Promoter from the 5′ region of glycinin Gy1 to promote expression of gene of interest in soybean seed].
[0747] Signal Peptide: Name: [sig2]; Donor: [Glycine max]; Description: [Glycinin G1 N-terminal peptide to localize heterologous protein].
[0748] Gene: Name: [OBC-T5:OBC-T4:OBC-T3:OBC-T2]; Donor:[Bos taurus]; Description: [Soybean codon-optimized bovine beta-casein from Bos taurus encoding casein protein tagged with soybean codon-optimized bovine beta-casein from Bos taurus encoding casein protein, tagged with soybean codon-optimized bovine beta-casein from Bos taurus encoding casein protein, and tagged with soybean codon-optimized bovine beta-casein from Bos taurus encoding casein protein].
[0749] Terminator; Name: [AtHSP_T:AtUbi10_T]; Donor: [Arabidopsis thaliana]; Description: [Heat shock termination sequence from Arabidopsis thaliana followed by ubiquitin 10 termination sequence from Arabidopsis thaliana to stabilize gene of interest transcript].

### Construct 4: Gamma-Zein-Beta-casein

[0750] ARDV-16 contains the binary pCAMBIA3300 base vector with features such as the right border repeat from nopaline C58 T-DNA, (RB-T-DNA repeat) the stability protein from Pseudomonas plasmid pVS1 (pVS1 StaA), the replication protein from Pseudomonas plasmid pVS1 (pVS1 repA), origin of replication for the Pseudomonas plasmid pVS1 (pVS1 oriV), the basis of mobility region from pBR322 (bom), high-copy-number ColEl/pMB1/pBR322/pUC origin of replication (ori), aminoglycoside phosphotransferase which confers resistance to kanamycin, and the left border repeat from nopaline C58 T-DNA (LB-T-DNA repeat). Additionally, ARDV-16 contains the plant selection marker cassette (StUbi3P:Csr1StUbi3T) which confers resistance to imazapyr, and the cassette with the genes of interest (GmSeed2:sig2:γZein:OBC-T2:EUT:Rb7T) which are located between the LB and RB T-DNA repeats.
[0751] Organism: Glycine Max
[0752] Mode of transformation: [Agrobacterium tumefaciens, disarmed].
[0753] Phenotype description: Herbicide Tolerance—imazapyr resistant; Product Quality-[Storage protein altered].

### AHAS Selection Marker Cassette

[0754] Genotype: Selection Marker comprising the sequence of SEQ ID NO: 911.
[0755] Promoter: [StUbi3P]; Donor: [Solanum tuberosum]; Description: [ubiquitin 3 gene to promote expression of imazapyr resistance gene].
[0756] Gene: [CSR1]; Donor: [Arabidopsis thaliana]; Description: [confer resistance to imazapyr for selection of transgenic events].
[0757] Terminator: Name: [StUbi3T]; Donor: [Solanum tuberosum]; Description: [ubiquitin 3 gene for CSR1 transcription stabilization].

### Gene(s) of Interest

[0758] Promoter: Name: [GmSeed2]; Donor: [Glycine max]; Description: [Promoter from the 5′ region of glycinin Gy1 to promote expression of gene of interest in soybean seed].
[0759] Signal Peptide: Name: [sig2]; Donor: [Glycine max]; Description: [Glycinin G1 N-terminal peptide to localize heterologous protein].
[0760] Gene: Name: [γZein:OBC-T2]; Donor:[Bos taurus, Zea Mays]; Description: [Soybean codon-optimized Gamma zein from Zea Mays encoding a glutelin protein tagged with soybean codon-optimized bovine beta-casein from Bos taurus encoding casein protein].
[0761] Terminator: Name: [NtEU_T:NtRb7_T]; Donor: [Nicotiana tabacum]; Description: [Extensin termination sequence from Nicotiana tabacum followed by Rb7 matrix attachment region termination sequence from Nicotiana tabacum to stabilize gene of interest transcript].

TABLE 32
Exemplary fusion protein constructs

| | | | Gene of Interest |
|---|---|---|---|
| Drawing | Name | Construct Details | (GOI) Payload |
| FIG. | ARDV-02 | GmSeed2:sig2:OBC- | Beta-casein--FM-- |
| 40A | | T4:FM:OaS1-T2:FM:OaS1- | AlphaS1-casein--FM-- |
| | | T:FM:OBC-T2:AtHSPT:AtUbi10T | AlphaS1-casein--FM-- |
| | | | Beta-casein |
| | | | (SEQ ID NO: 906) |
| FIG. | ARDV-11 | GmSeed2:sig2:OBC-T3:OBC- | Beta-casein--Beta- |
| 40B | | T2:OKC1-T:OLG1:AtHSPT:AtUbi10T | casein-Kappa-casein-- |
| | | | Beta-lactoglobulin |
| | | | (SEQ ID NO: 908) |
| FIG. | ARDV-12 | GmSeed2:sig2:OBC-T5:OBC- | Beta-casein--Beta- |
| 40C | | T4:OBC-T3:OBC-T2:AtHSPT:AtUbi10T | casein--Beta-casein-- |
| | | | Beta-casein |
| | | | (SEQ ID NO: 910) |
| FIG. | ARDV-16 | GmSeed2:sig2:yZein:OBC- | Gamma-Zein--Beta- |
| 40D | | T2:EUT:Rb7T | casein |
| | | | (SEQ ID NO: 912) |

### Example 2: Identification of Transgenic Events, Recombinant Protein Extraction and Detection

[0762] To quantify recombinant protein expression levels, DNA constructs such as those shown in FIG. 4-FIG. 9 were transformed into soybean using transformation protocols well known in the art, for example, by bombardment or agrobacterium. Total soybean genomic DNA was isolated from the first trifoliate leaves of transgenic events using the PureGene tissue DNA isolation kit (product #158667: QIAGEN, Valencia, CA, USA). Trifoliates were frozen in liquid nitrogen and pulverized. Cells were lysed using the PureGene Cell Lysis Buffer, proteins were precipitated using the PureGene Protein Precipitation Buffer, and DNA was precipitated from the resulting supernatant using ethanol. The DNA pellets were washed with 70% ethanol and resuspended in water.

[0763] Genomic DNA was quantified by the Quant-iT PicoGreen (product #P7589: ThermoFisher Scientific, Waltham, MA, USA) assay as described by manufacturer, and 150 ng of DNA was digested overnight with EcoRI, HindIII, NcoI, and/or KpnI, 30 ng of which was used for a BioRad ddPCR reaction, including labelled FAM or HEX probes for the transgene and Lectin1 endogenous gene respectively. Transgene copy number (CNV) was calculated by comparing the measured transgene concentration to the reference gene concentration. A CNV of greater than or equal to one was deemed acceptable.

### Preparation of Total Soluble Protein Samples

[0764] Total soluble soybean protein fractions were prepared from the seeds of transgenic events by bead beating seeds (seeds collected about 90 days after germination) at 15000 rpm for 1 min. The resulting powder was resuspended in 50 mM Carbonate-Bicarbonate pH 10.8, 1 mM DTT, 1×HALT Protease Inhibitor Cocktail (Product #78438 ThermoFisher Scientific). The resuspended powder was incubated at 4° C. for 15 minutes and then the supernatant collected after centrifuging twice at 4000 g, 20 min, 4° C. Protein concentration was measured using a modified Bradford assay (Thermo Scientific Pierce 660 nm assay; Product #22660 ThermoFisher Scientific) using a bovine serum albumin (BSA) standard curve.

### Recombinant Protein Quantification via Western Blot Densitometry

[0765] SDS-PAGE was performed according to manufacturer's instructions (Product#5678105BioRad, Hercules, CA, USA) under denaturing and reducing conditions. 5 μg of total protein extracts were loaded per lane. For immunoblotting proteins separated by SDS-PAGE were transferred to a PVDF membrane using Trans-Blot® Turbo™ Midi PVDF Transfer Packs (Product #1704157 BioRad) according to manufacturer's guidelines. Membranes were blocked with 3% BSA in phosphate buffered saline with 0.5% Tween-20, reacted with antigen specific antibody and subsequently reacted with fluorescent goat anti rabbit IgG (Product #60871 BioRad, CA). Membranes were scanned according to manufacturer's instructions using the ChemiDoc MP Imaging System (BioRad, CA) and analyzed using ImageLab Version 6.0.1 Standard Edition (Bio-Rad Laboratories, Inc.) Recombinant protein from the seeds of transgenic events was quantified by densitometry from commercial reference protein spike-in standards.

[0766] Shown in FIG. 10A, FIG. 10B, FIG. 10C, and FIG. 10D are Western Blots of protein extracted from transgenic soybeans expressing the κ-casein-β-lactoglobulin expression cassette shown in FIG. 4. FIG. 10A shows the fusion protein detected using a primary antibody raised against κ-casein. The first lane is a molecular weight marker. Lanes two (DCI 9.1) and three (DCI 9.2) represent individual seeds from a single transgenic line. Lane four (DCI 3.1) represents a seed from a separate transgenic line. Lane five is protein extracted from wild-type soybean plants, and lanes six—eight are protein extracted from wild-type soybean plants spiked with 0.05% commercial κ-casein (lane 6), 0.5% commercial κ-casein (lane 7), and 1.5% commercial κ-casein (lane 8). The κ-casein commercial protein is detected at an apparent molecular weight (MW) of ˜26 kDa (theoretical: 19 kDa—arrow). The fusion protein is detected at an apparent MW of ˜40 kDa (theoretical: 38 kDa—arrowhead).

[0767] FIG. 10B shows the fusion protein detected using a primary antibody raised against β-lactoglobulin. The first lane is a molecular weight marker. Lanes two (DCI 9.1) and three (DCI 9.2) represent individual seeds from a single transgenic line. Lane four (DCI 3.1) represents a seed from a separate transgenic line. Lane five is protein extracted from wild-type soybean plants, and lanes six—eight are protein extracted from wild-type soybean plants spiked with 0.05% commercial β-lactoglobulin (lane 6), 1% commercial β-lactoglobulin (lane 7), and 2% commercial β-lactoglobulin (lane 8). The β-lactoglobulin commercial protein is detected at an apparent MW of ˜18 kDa (theoretical: 18 kDa—arrow). The fusion protein is detected at an apparent MW of ˜40 kDa (theoretical: 38 kDa—arrowhead). FIG. 10C and FIG. 10D show the protein gels as control for equal lane loading (image is taken at the end of the SDS run) for FIG. 10A and FIG. 10B, respectively.

[0768] Shown in FIG. 15A and FIG. 15B are Western Blots of protein extracted from transgenic soybeans expressing a β-casein-β-lactoglobulin fusion protein. FIG. 15A shows the fusion protein detected using a primary antibody raised against β-casein. The first lane is a molecular weight marker. Lane two (IX2) represents individual seeds from a single transgenic line. Lanes three through seven are samples comprising protein extracted from wild-type soybean plants spiked with 3% commercial β-casein (lane 3), 1.5% commercial β-casein (lane 4), 0.75% commercial β-casein (lane 5), 0.37% commercial β-casein (lane 6), and 0% commercial β-casein (lane 7). The fusion protein was detected at an apparent MW of ˜40 kDa (arrow; theoretical: 42 kDa).

[0769] Other combinations of proteins were tested and evaluated for the percentage of recombinant protein. Cassettes having the same promoter (Seed2-sig), signal peptide (EUT:Rb7T), and in some instances a different terminator, were built with either α-S1-casein, β-casein, κ-casein, or the fusion of β-lactoglobulin (LG) with κ-casein (kCN) (See FIG. 3 and FIG. 8). As shown below in Table 18, none of the cassettes encoding α-S1-casein, β-casein, or κ-casein alone were able to produce expression of the protein at a level that exceeded 1% total soluble protein. However, when κ-casein was fused with β-lactoglobulin, κ-casein was expressed at a level that was greater than 1% total soluble protein. Similarly, when β-casein or alpha-S1-casein were fused with β-lactoglobulin, the β-casein and the alpha-S1-casein were expressed at a level that was greater than 1% total soluble protein.

TABLE 33
Expression levels of milk proteins expressed
alone or in a fusion protein

| | | | Number of events¹ accumulating | |
|---|---|---|---|---|
| | | Total | the recombinant protein at the | |
| | | events¹ | concentration: | |
| | | analyzed | 0-1% TSP | Above 1% TSP |
| Single | κ-Casein | 89 | 89 | 0 |
| Proteins | β-Casein | 12 | 12 | 0 |
| | αS1-Casein | 6 | 6 | 0 |
| Fusion | κ-Casein -LG | 23 | 12 | 11 |
| | β-Casein-LG | 25 | 5 | 20 |
| | αS1-Casein-LG | 10 | 4 | 6 |

¹As used in Table 33, the each “event” refers to an independent transgenic line.

[0770] As will be readily understood by those of skill in the art, T-DNA insertion into the plant genome is a random process and each T-DNA lands at an unpredictable genomic position. Thus, for example, each of the 23 events generated in Table 33 for the κ-Casein-LG fusion protein have different genomic insertion loci. The genomic context greatly influences the expression levels of a gene, and each locus will be either favorable or unfavorable for the expression of the recombinant genes. The variability observed at the protein level is a reflection of that random insertion process and explains why 12 out of 23 events present expression levels below 100.

### Example 3: Expression of Casein Multimers

[0771] A casein multimer is a fusion protein comprising at least a first casein protein and a second casein protein, wherein the first and second casein proteins are the same (homo-multimer) or different (hetero-multimer). Expression vectors for producing casein multimers were created, using the methods described in Example 1. Specifically, expression vectors were created to express casein multimers comprising: (i) kappa-casein fused to kappa-casein, (ii) kappa-casein fused to beta-casein, and (iii) kappa-casein fused to alpha-S11-casein. Expression vectors were also created to express: (iv) kappa-casein fused to GFP, and (v) kappa-casein fused to beta-lactoglobulin.

[0772] Illustrative casein multimers prepared during this study are shown below in Table 34. Colons (:) are used to indicate junctions between various elements of the fusion protein. KDEL indicates the use of a KDEL sequence (i.e., an endoplasmic reticulum retention signal) and FM indicates the use of a linker comprising a chymosin cleavage site.

TABLE 34
Illustrative Milk Protein Multimers

| | | | Amino |
|---|---|---|---|
| | | DNA | Acid |
| | | Sequence | Sequence |
| | Abbreviated | (SEQ | (SEQ |
| Description | Description | ID NO) | ID NO) |
| Optimized para kappa-casein truncated | paraOKC1- | 615 | 616 |
| version 1 (paraOKC1-T):FM:Optimized | T:FM:OLG1 | | |
| beta-lactoglobulin version 1 (OLG1) | | | |
| Optimized para kappa-casein truncated | paraOKC1- | 617 | 618 |
| version 1 (paraOKC1-T):FM:Optimized | T:FM:OLG1:KDEL | | |
| beta-lactoglobulin version 1 | | | |
| (OLG1):KDEL | | | |
| Optimized para kappa-casein truncated | paraOKC1-T:OLG1 | 619 | 620 |
| version 1 (paraOKC1-T):Optimized | | | |
| beta-lactoglobulin version 1 (OLG1) | | | |
| Optimized para kappa-casein truncated | paraOKC1- | 621 | 622 |
| version 1 (paraOKC1-T):Optimized | T:OLG1:KDEL | | |
| beta-lactoglobulin version 1 | | | |
| (OLG1):KDEL | | | |
| Optimized beta-lactoglobulin version 1 | OLG:FM:paraOKC1- | 623 | 624 |
| (OLG1):FM:Optimized para kappa- | T | | |
| casein truncated version 1 (paraOKC1-T) | | | |
| Optimized beta-lactoglobulin version 1 | OLG:FM:paraOKC1- | 625 | 626 |
| (OLG1):FM:Optimized para kappa- | T:KDEL | | |
| casein truncated version 1 (paraOKC1- | | | |
| T):KDEL | | | |
| Optimized beta-lactoglobulin version 1 | OLG:paraOKC1-T | 627 | 628 |
| (OLG1):Optimized para kappa-casein | | | |
| truncated version 1 (paraOKC1-T) | | | |
| Optimized beta-lactoglobulin version 1 | OLG:paraOKC1- | 629 | 630 |
| (OLG1):Optimized para kappa-casein | T:KDEL | | |
| truncated version 1 (paraOKC1- | | | |
| T):KDEL | | | |
| Optimized alpha S1-casein truncated | OaS1-T:FM:OLG1 | 631 | 632 |
| version 1 (OaS1-T):FM:Optimized | | | |
| beta-lactoglobulin version 1 (OLG1) | | | |
| Optimized alpha S1-casein truncated | OaS1- | 633 | 634 |
| version 1 (OaS1-T):FM:Optimized | T:FM:OLG1:KDEL | | |
| beta-lactoglobulin version 1 | | | |
| (OLG1):KDEL | | | |
| Optimized alpha S1-casein truncated | OaS1-T:OLG1 | 635 | 636 |
| version 1 (OaS1-T):Optimized beta- | | | |
| lactoglobulin version 1 (OLG1) | | | |
| Optimized alpha S1-casein truncated | OaS1- | 637 | 638 |
| version 1 (OaS1-T):Optimized beta- | T:OLG1:KDEL | | |
| lactoglobulin version 1 (OLG1):KDEL | | | |
| Optimized beta-lactoglobulin version 1 | OLG1:FM:OaS1-T | 639 | 640 |
| (OLG1):FM:Optimized alpha S1-casein | | | |
| truncated version 1 (OaS1-T) | | | |
| Optimized beta-lactoglobulin version 1 | OLG1:FM:OaS1- | 641 | 642 |
| (OLG1):FM:Optimized alpha S1-casein | T:KDEL | | |
| truncated version 1 (OaS1-T):KDEL | | | |
| Optimized beta-lactoglobulin version 1 | OLG1:OaS1-T | 643 | 644 |
| (OLG1):Optimized alpha S1-casein | | | |
| truncated version 1 (OaS1-T) | | | |
| Optimized beta-lactoglobulin version 1 | OLG1:OaS1- | 645 | 646 |
| (OLG1):Optimized alpha S1-casein | T:KDEL | | |
| truncated version 1 (OaS1-T):KDEL | | | |
| Optimized beta-lactoglobulin version 1 | OLG1:FM:OBC-T2 | 647 | 648 |
| (OLG1):FM:Optimized beta-casein (A2 | | | |
| variant) truncated version 2 | | | |
| Optimized beta-casein (A2 variant) | OBC-T2:OKC1- | 649 | 650 |
| truncated version 2:Optimized kappa- | T:OLG1 | | |
| casein truncated version 1 (OKC1- | | | |
| T):Optimized beta-lactoglobulin version 1 | | | |
| (OLG1) | | | |
| Optimized beta-casein (A2 variant) | OBC-T3:OBC- | 651 | 652 |
| truncated version 3:Optimized beta- | T2:OKC1-T:OLG1 | | |
| casein (A2 variant) truncated version | | | |
| 2:Optimized kappa-casein truncated | | | |
| version 1 (OKC1-T):Optimized beta- | | | |
| lactoglobulin version 1 (OLG1) | | | |
| Optimized beta-casein (A2 variant) | OBC-T4:OBC- | 653 | 654 |
| truncated version 4:Optimized beta- | T3:OBC-T2:OKC1- | | |
| casein (A2 variant) truncated version | T:OLG1 | | |
| 3:Optimized beta-casein (A2 variant) | | | |
| truncated version 2:Optimized kappa- | | | |
| casein truncated version 1 (OKC1- | | | |
| T):Optimized beta-lactoglobulin version 1 | | | |
| (OLG1) | | | |
| Optimized beta-casein (A2 variant) | OBC-T5:OBC- | 655 | 656 |
| truncated version 5:Optimized beta- | T4:OBC-T3:OBC- | | |
| casein (A2 variant) truncated version | T2:OKC1-T:OLG1 | | |
| 5:Optimized beta-casein (A2 variant) | | | |
| truncated version 4:Optimized beta- | | | |
| casein (A2 variant) truncated version | | | |
| 3:Optimized beta-casein (A2 variant) | | | |
| truncated version 2:Optimized para | | | |
| kappa-casein truncated version 1 | | | |
| (paraOKC1-T):Optimized beta- | | | |
| lactoglobulin version 1 (OLG1) | | | |
| Optimized beta-casein (A2 variant) | OBC-T5:OBC- | 657 | 658 |
| truncated version 5:Optimized beta- | T4:OBC-T3:OBC- | | |
| casein (A2 variant) truncated version | T2:OLG1 | | |
| 4:Optimized beta-casein (A2 variant) | | | |
| truncated version 3:Optimized beta- | | | |
| casein (A2 variant) truncated version | | | |
| 2:Optimized beta-lactoglobulin version 1 | | | |
| (OLG1) | | | |
| Optimized beta-casein (A2 variant) | OBC-T5:OBC- | 659 | 660 |
| truncated version 5:Optimized beta- | T4:OBC-T3:OBC-T2 | | |
| casein (A2 variant) truncated version | | | |
| 4:Optimized beta-casein (A2 variant) | | | |
| truncated version 3:Optimized beta- | | | |
| casein (A2 variant) truncated version 2 | | | |
| Optimized beta-casein (A2 variant) | OBC-T5:FM:OBC- | 661 | 662 |
| truncated version 5:FM:Optimized beta- | T4:FM:OBC- | | |
| casein (A2 variant) truncated version | T3:FM:OBC- | | |
| 4:FM:Optimized beta-casein (A2 variant) | T2:FM:OLG1 | | |
| truncated version 3:FM:Optimized beta- | | | |
| casein (A2 variant) truncated version | | | |
| 2:FM:Optimized beta-lactoglobulin version | | | |
| 1 (OLG1) | | | |
| Optimized beta-casein (A2 variant) | OBC-T5:FM:OBC- | 663 | 664 |
| truncated version 5:FM:Optimized beta- | T4:FM:OBC- | | |
| casein (A2 variant) truncated version | T3:FM:OBC-T2 | | |
| 4:FM:Optimized beta-casein (A2 variant) | | | |
| truncated version 3:FM:Optimized beta- | | | |
| casein (A2 variant) truncated version 2 | | | |
| Optimized beta-casein (A2 variant) | OBC-T4:FM:OBC- | 792 | 793 |
| truncated version 4:FM:Optimized beta- | T3:FM:OBC-T2 | | |
| casein (A2 variant) truncated version | | | |
| 3:FM:Optimized beta-casein (A2 variant) | | | |
| truncated version 2 | | | |
| Optimized beta-casein (A2 variant) | OBC-T4:FM:OBC- | 794 | 795 |
| truncated version 4:FM:Optimized beta- | T3:FM:OBC- | | |
| casein (A2 variant) truncated version | T2:FM:OLG1 | | |
| 3:FM:Optimized beta-casein (A2 variant) | | | |
| truncated version 2:FM:Optimized beta- | | | |
| lactoglobulin version 1 (OLG1) | | | |
| Optimized beta-casein (A2 variant) | OBC-T4:OBC- | 796 | 797 |
| truncated version 4:Optimized beta- | T3:OBC-T2 | | |
| casein (A2 variant) truncated version | | | |
| 3:Optimized beta-casein (A2 variant) | | | |
| truncated version 2 | | | |
| Optimized beta-casein (A2 variant) | OBC-T4:OBC- | 798 | 799 |
| truncated version 4:Optimized beta- | T3:OBC-T2:OLG1 | | |
| casein (A2 variant) truncated version | | | |
| 3:Optimized beta-casein (A2 variant) | | | |
| truncated version 2:Optimized beta- | | | |
| lactoglobulin version 1 (OLG1) | | | |

[0773] The expression constructs were transformed into soybean, as described in Example 2. Quantification of casein multimer expression was performed using Western Blot Densitometry. Table 35 shows expression levels of the casein proteins when expressed in the indicated multimer constructs, relative to the caseins expressed alone (i.e., not as part of a fusion protein).

TABLE 35
Expression levels of casein multimers relative to caseins expressed alone

| | Fold increase | Fold increase | Fold increase |
|---|---|---|---|
| | in expression | in expression | in expression |
| | relative to κ- | relative to B- | relative to αS1- |
| Casein Multimer Fusion Protein | Casein alone | Casein alone | Casein alone |
| κ-Casein:κ-Casein | 3.4 | — | — |
| κ-Casein:β-Casein | 17 | 2.5 | — |
| κ-Casein:αS1-Casein | 5 | — | 32 |
| κ-Casein:GFP | 16 | — | — |
| αS1-Casein:GFP | — | — | 77 |
| κ-Casein:β-Lactoglobulin | 68 | — | — |
| β-Casein:β-Lactoglobulin | — | 27 | — |
| αS1-Casein-β:Lactoglobulin | — | — | 522 |
| κ-Casein:α-Lactalbumin | 10 | — | — |
| β-casein:α-Lactalbumin | — | 2.8 | — |
| αS1-Casein:α-Lactalbumin | — | — | 150 |
| β-Casein:β-Casein:β-Casein | — | 10.7 | — |
| β-Casein:β-Casein:β-Casein:β-Casein | — | 14.5 | — |

[0774] As shown in Table 35, expression of the casein proteins as multimers led to significant increases in expression relative to the caseins expressed alone. Specifically, expression of kappa-casein as a casein homo-multimer led to a 3.4-fold increase in expression relative to expression of casein alone. Expression of kappa-casein as a multimer with beta-casein led to 17-fold and 2.5-fold increases in expression, respectively, relative to either protein expressed alone. Expression of kappa-casein as a multimer with alpha-S1-casein led to 5-fold and 32-fold increases in expression, respectively, relative to either protein expressed alone. Expression of kappa-casein fused to GFP led to a 16-fold increase in expression. Expression of kappa-casein fused to beta-lactoglobulin led to a 68-fold increase in expression, and expression of beta-casein fused to beta-lactoglobulin led to an 11.5-fold increase in expression. Expression of beta-casein or alpha-S-casein was also increased by fusion to alpha-lactalbumin (2.8-fold and 150-fold respectively).

[0775] Expression of β-casein as a trimer or tetramer also led to significant increases in expression relative to β-casein expressed alone (18-fold and 18.5-fold, respectively).

[0776] Without being bound by any theory, it is believed that fusing a first casein protein to a second protein partially or fully shields each of the proteins from degradation by host cell proteases and allows for accumulation of the casein in the cell.

### Example 4: Kappa-Casein is Sensitive to Soybean Endogenous Proteolysis Activity

[0777] To determine whether endogenous host cell proteases are responsible for degradation of casein proteins expressed alone, soybean total protein extracts were spiked with 100 ng of commercial kappa-casein, in the presence or absence of Halt Protease Inhibitor Cocktail (Thermo Fisher Scientific). All samples were incubated at 37° C. for two hours. The samples were then subjected to analysis using a Western blot. The protein was detected using a primary antibody against kappa-casein.

[0778] As shown in FIG. 14A and FIG. 14B, most of the kappa-casein added to the cellular extracts was degraded, and this degradation was prevented by the addition of protease inhibitors. This data confirms that kappa-casein is sensitive to soybean endogenous proteolysis activity. Inhibition of endogenous proteolysis activity may lead to increased casein accumulation in transformed cells.

### Example 5: Food Compositions

[0779] The transgenic plants expressing the recombinant fusion proteins described herein can produce milk proteins for the purpose of food industrial, non-food industrial, pharmaceutical, and commercial uses described in this disclosure. Illustrative methods for making a food composition are provided in FIG. 13 and FIG. 17.

[0780] A fusion protein comprising an unstructured milk protein (e.g., a casein such as para-κ-casein, κ-casein, β-casein, αS1-casein, or αS2-casein), and a structured mammalian protein (e.g. β-lactoglobulin) is expressed in a transgenic plant (e.g. a soybean plant). In some constructs, the fusion protein comprises a chymosin cleavage site between the milk protein (e.g., a casein such as para-κ-casein, κ-casein, β-casein, αS1-casein, or αS2-casein) and the β-lactoglobulin.

[0781] The fusion protein is extracted from the plant. The fusion protein is then treated with chymosin, to separate the milk protein (e.g., a casein) from the β-lactoglobulin. The casein is isolated and/or purified and used to make a food composition (e.g., cheese).

### Example 6: Determination of Physicochemical Parameters that Contribute to Casein Accumulation in Plants

[0782] The purpose of the experiments described in this example was to determine the physicochemical parameters of proteins (i.e., fusion partners) that, when fused to a casein protein, are capable of enhancing accumulation thereof.

[0783] Various proteins having distinct physicochemical properties were fused to kappa-casein. The physicochemical properties thereof are listed in Table 36. The fusion proteins were then expressed in soybean plants as described above. Protein expression levels of the fusion protein and relative increases thereof relative to casein alone (not expressed as a fusion) were measured.

[0784] Results are summarized in Table 36. The term “KCN-fusion % TSP” refers to protein expression levels of the fusion protein, as a fraction of total soluble protein. The term “% KCN only” refers to increases in kappa-casein expression relative to kappa casein expressed alone (not as a fusion). The % KCN only value was calculated by division the KCN-fusion % TSP value by 0.059 (i.e., the percent accumulation of kappa-casein by itself).

TABLE 36
Proteins fused to kappa casein and physicochemical parameters thereof

| | | | Percentage | Number of | | |
|---|---|---|---|---|---|---|
| | Uniprot | | hydrophobic | disulfide | KCN- | |
| | Accession | MW in | AA/Total | bonds/per | fusion | % KCN |
| Full name | No. | kDa | AA (%) | 10 kDa | % TSP | only |
| Kappa Casein | P02668 | 18.9 | 48.04 | 0.53 | 0.2 | 339 |
| Beta Casein | P02668 | 23.5 | 53.11 | 0 | 1 | 1695 |
| Alpha Casein | P18626 | 22.9 | 45.23 | 0 | 0.29 | 492 |
| Beta Lactoglobulin | P02754 | 18.2 | 48.15 | 1.1 | 4 | 6780 |
| Alpha Lactalbumin | P00711 | 14.1 | 36.59 | 2.2 | 0.34 | 1017 |
| Green Fluorescent | P42212 | 26.8 | 40.76 | 0 | 0.94 | 1593 |
| Protein | | | | | | |
| Lysozyme | Q6B411 | 14.9 | 39.23 | 2.68 | 0.05 | 85 |
| 2S globulin | P19594 | 16.1 | 24.82 | 2.48 | 0.1 | 169 |
| Oleosin A | P29530 | 23.5 | 51.11 | 0 | 0.1 | 169 |
| Oleosin B | P29531 | 23.4 | 50.67 | 0 | 0.1 | 169 |
| Kunitz-Trypsin | Q39898 | 21 | 41.67 | 0.95 | 0.001 | 16.9 |
| inhibitor | | | | | | |
| Bowman-Birk | I1MQD2 | 9 | 25 | 3.33 | 0.05 | 85 |
| inhibitor | | | | | | |
| Hydrophobin II | P79073 | 7.19 | 49.3 | 5.56 | 0.025 | 42 |

[0785] An analysis of the data shown in Table 36 is provided in FIG. 16A, FIG. 16B, and FIG. 16C. This analysis suggests that there are several physicochemical properties of proteins that when fused to kappa-casein, may contribute to accumulation of the kappa-casein. The first is molecular weight. In general, a protein (fusion partner) with molecular weight of 15 kDa or higher tended to increase accumulation (FIG. 16A). The second is hydrophobicity. A protein (fusion partner) having greater than about 30% hydrophobic amino acids also tended to increase accumulation (FIG. 16B). The third is flexibility. A protein (fusion partner) with less than about 2.5 disulfide bonds per 10 kDa molecular weight also tended to increase accumulation (FIG. 16B). The disulfide bonds were predicted using a computer program. Notably, the number of cysteines in the protein, on its own, was not predictive of the protein's ability to contribute to accumulation of the kappa-casein.

[0786] Notably, as evidenced by the data in Table 36 and FIG. 16A-16C, the fusion partner did not need to have all three of these characteristics in order to increase accumulation of kappa-casein. For example, increases in accumulation were observed in some cases where the fusion partner had only one, only two or all three of these characteristics.

### Example 7: Fusion Proteins Comprising Milk Proteins and Prolamin Proteins

[0787] To determine the impact of including a prolamin in a fusion protein on accumulation thereof in a seed, expression vectors for producing fusion proteins comprising a milk protein and a prolamin protein were created using the methods described in Example 1. Specifically, expression vectors were created to express fusion proteins comprising: (i) canein (gCan27) fused to β-casein, (ii) zein (7-zein) fused to β-casein, and (iii) canein (gCan27) fused to κ-casein.

[0788] Illustrative fusion proteins used during this study are shown below in Table 22. Colons (:) are used to indicate junctions between various elements of the fusion protein. FM indicates the use of a linker comprising a chymosin cleavage site.

TABLE 37
Fusion Proteins Comprising a Prolamin

| | | | Amino |
|---|---|---|---|
| | | DNA | Acid |
| | | Sequence | Sequence |
| | Abbreviated | (SEQ | (SEQ |
| Description | Description | ID NO) | ID NO) |
| 27 kD gamma canein | gCan27:FM:OBC- | 802 | 803 |
| (gcan27):FM:Optimized beta casein | T2 | | |
| truncated version 2 (OBC-T2):FM | | | |
| Gamma zein (yZein):Optimized beta-casein | yZein:OBC-T2 | 806 | 807 |
| truncated version 2 (OBC-T2) | | | |

[0789] The expression constructs were transformed into soybean, as described in Example 2. Western blots showing detection ofbeta-casein in transgenic seed extracts are provided in FIG. 21 and FIG. 22. Quantification of casein multimer expression was performed using Western Blot Densitometry. Table 38 shows expression levels ofthe beta-casein protein when expressed in the indicated fusion constructs, relative to the beta-casein expressed alone (i.e., not as part ofa fusion protein).

TABLE 38
Expression levels of beta-casein when fused to
a prolamin relative to caseins expressed alone

| | Fold increase in | Fold increase in |
|---|---|---|
| Casein Multimer | expression relative | expression relative |
| Fusion Protein | to κ-Casein alone | to B-Casein alone |
| gCan27:κ-Casein | 16 | — |
| gCan27:β-Casein | — | 40 |
| Zein:β-Casein | — | 55 |

[0790] As shown in Table 38, fusion of caseins to either canein or zein led to significant increases in expression relative to the caseins expressed alone. Specifically, expression of kappa-casein fused to gCan27 led to a 16-fold increase in expression relative to expression of kappa-casein alone. Expression of beta-casein fused to gCan27 led to a 40-fold increase in expression, relative to beta-casein expressed alone. Fusion of beta-casein to zein led to a 55-fold increase in expression, relative to beta-casein expressed alone. In each of these experiments, the casein protein accumulated in the seeds at a level well above 1% TSP.

[0791] Without being bound by any theory, it is believed that fusing a casein protein to a prolamin (e.g., a canein or a zein) leads to the formation of a protein body in the seed. The casein is then sequestered in the protein body, which partially or fully shields the casein from degradation by host cell proteases and allows for accumulation of the casein in the cell. An illustrative mechanism for protein body formation is found in FIG. 20.

### Example 8: Phosphorylation Prevents Degradation of Caseins in a Plant Cell

[0792] It was hypothesized that various post-translational modifications, such as phosphorylation, may have a “shielding” effect which prevents degradation of milk proteins, especially casein proteins, in a plant cell. Specifically, it was hypothesized that by adding one or more phosphates to a casein protein expressed in a plant cell, it may be possible to block and/or reduce the access of plant proteases to various cleavage sites on the protein. By reducing the ability of the plant proteases to degrade the milk protein, higher levels of protein accumulation may be possible.

[0793] To test this hypothesis, the enzyme Fam20C was co-expressed with one or more caseins in a plant cell. Fam20C is a golgi localized serine kinase and is responsible for the phosphorylation of caseins (Bauman, D. E., et al. “Major advances associated with the biosynthesis of milk.” Journal of dairy science 89, no. 4 (2006): 1235-1243.). These kinases recognize a S—X—S or a S-X-E motif To identify locations of identifiable motifs, ScanProsite was employed to search for the motif sequences of interest in caseins. Using the SxE/pS motify, Fam20C can account for approximately two-thirds of the secreted phosphoproteome. Fam20A is a pseudokinase (not catalytically active) that binds with Fam20C and makes it more active. Based on the analysis, the predicted phosphorylated sites in beta-casein, kappa-casein, OaS1, and OsS2, are shown in FIG. 43. Other kinases that can phosphorylate caseins are provided in Table 39. Based on InterPro, kinases that belong to the complementary families are: IPR024869 (FAM20), IPR009581 (FAM20_C), IPRO11009 (Kinase-like_dom_sf), IPR000719 (Prot_kinase_dom), IPRO17441 (Protein_kinase_ATP_BS), IPR008271 (Ser/Thr_kinase_AS), and IPR022247 (Casein_kinase-1_gamma_C).

TABLE 39
Exemplary kinases that can phosphorylate caseins.

| Kinases family | Motif | Reference |
|---|---|---|
| Fam20C (aka Golgi | S-X-S/pE | Tagliabracci V S, Wiley S E, Guo X, Kinch L N, |
| casein Kinase, (G- | | Durrant E, Wen J, Xiao J, Cui J, Nguyen K B, Engel |
| CK), dentin matrix | | J L, Coon J J, Grishin N, Pinna L A, Pagliarini D J, |
| protein-4 (DMP-4)) | | Dixon J E. A Single Kinase Generates the Majority |
| | | of the Secreted Phosphoproteome. Cell. 2015 Jun. |
| | | 18; 161(7): 1619-32. doi: |
| | | 10.1016/j.cell.2015.05.028. PMID: 26091039; |
| | | PMCID: PMC4963185. |
| Fam20C/Fam20A | S-X-S/pE | Tagliabracci V S, Wiley S E, Guo X, Kinch L N, |
| pseudokinase | | Durrant E, Wen J, Xiao J, Cui J, Nguyen K B, Engel |
| | | J L, Coon J J, Grishin N, Pinna L A, Pagliarini D J, |
| | | Dixon J E. A Single Kinase Generates the Majority |
| | | of the Secreted Phosphoproteome. Cell. 2015 Jun. |
| | | 18; 161(7): 1619-32. doi: |
| | | 10.1016/j.cell.2015.05.028. PMID: 26091039; |
| | | PMCID: PMC4963185. |
| Casein Kinase 1 | pS/pT-X-X-S/T | Venerando A, Ruzzene M, Pinna L A. Casein |
| (CK1) | (E, D)n-X-X- | kinase: the triple meaning of a misnomer. Biochem |
| | S/T | J. 2014 Jun. 1; 460(2): 141-56. doi: |
| | | 10.1042/BJ20140178. PMID: 24825444. |
| Casein Kinase 2 | S/T-X-X- | Venerando A, Ruzzene M, Pinna L A. Casein |
| (CK2) | E/D/pS/pY | kinase: the triple meaning of a misnomer. Biochem |
| | | J. 2014 Jun. 1; 460(2): 141-56. doi: |
| | | 10.1042/BJ20140178. PMID: 24825444. |
| FAMK-1 | S-X-S/pE | pnas.org/doi/10.1073/pnas.1309211110 |
| Casein kinase-like | serine/threonine | tandfonline.com/doi/full/10.1080/17429145.2012.7 |
| proteins (kinases in | protein kinase - | 49433&sa=D&source=docs&ust=16626909853926 |
| plants that can | motif not | 88&usg=AOvVaw34iotcnEHRrMNy2c_ZbqbA |
| phosphorylate | specified | |
| caseins) | | |
| Early Flowering1 | serine/threonine | Dai and Xue, 2010; Chen et al., 2018 |
| (EL1)-like proteins | protein kinase - | |
| (kinases in plants that | motif not | |
| can phosphorylate | specified | |
| caseins) | | |

The phosphorylatable residue(s) are in bold and the specificity determinants are underlined. X denotes any residue, but in the CK2 consensus, these are preferably acidic amino acids.

[0794] The expression construct used in this study is shown in FIG. 24E. The construct comprised (i) a first expression cassette comprising the GmSeed2 promoter (SEQ ID NO: 813), a sig2 signal peptide (SEQ ID NO: 814), a sequence encoding a fusion protein (GOI, see table below), and an AtHSP/AtUbi10 Terminator (SEQ ID NO: 815, 816), and (ii) a second expression cassette comprising the pvPhas promoter (SEQ ID NO: 817), an Arc5′UTR (SEQ ID NO: 818), a sig10 signal peptide (SEQ ID NO: 819), a sequence encoding the Fam20c kinase (SEQ ID NO: 821), and a 3 arc terminator (SEQ ID NO: 822). This expression construct was cloned into a binary Agrobacterium vector, as illustrated in FIG. 23. The vector was then transformed into soybean plants, and protein expression was measured in the seeds using a Western Blot. An anti-beta-casein antibody was used to detect fusion protein expression.

### Results

[0795] Expression levels of the transformants are shown in Table 40. Table 40 compares expression levels of the casein when expressed alone vs. as a fusion protein, with or without Fam20c co-expression. When expressed without the kinase, the kappa-casein:beta-casein fusion protein produced a 17-fold increase in kappa-casein expression relative to kappa-casein expressed alone, and a 2.5-fold increase in beta-casein expression relative to beta-casein expressed alone. When this fusion protein was co-expressed with Fam20C, the expression of kappa-casein was 254-fold greater than kappa-casein expressed alone, and 38-fold greater than beta-casein expressed alone. Notably, expression of a kappa-casein:beta-casein:alpha-S1-casein fusion with a kinase resulted in a 185-fold increase in kappa-casein relative to kappa-casein alone, 25-fold increase in expression of beta-casein relative to beta-casein alone, and 1000-fold increase in alpha-S1-casein relative to alpha-S1-casenin alone.

TABLE 40
Expression levels of caseins when co-expressed with
a kinase compared to caseins expressed alone

| | | Increased | Increased | Increased |
|---|---|---|---|---|
| | | fold vs KCN | fold vs BCN | fold vs aS1 |
| No | κ-Casein-B-Casein | 17 | 2.5 | — |
| Kinase | | | | |
| Kinase | κ-Casein-B-Casein/ | 254 | 38 | — |
| | Fam20C | | | |
| | κ-Casein-B-Casein- | 185 | 25 | 1000 |
| | aS1-Casein/Fam20C | | | |

[0796] Taken together, these data indicate that co-expression of a kinase with a fusion protein comprising one or more casein proteins in a plant cell leads to an increase in accumulation of the casein protein in the cell. Without being bound by any theory, the addition of one or more phosphates to the casein protein can protect it from degradation by one or more plant proteases. Prophetic Study Evaluating Performance of Alternate Kinases

[0797] A study to evaluate the expression levels of caseins when co-expressed with alternate kinases as compared to casein-alone is performed utilizing any or all of the exemplary kinases from Table 39 or a kinase from a complementary family. An expression construct encoding for an alternate kinase and one or more caseins is cloned into a binary Agrobacterium vector. The vector is transformed into a soybean plant, and protein expression is measured in soybean seeds.

[0798] Expression levels are evaluated to determine differences between plants expressing the alternate kinase and those not expressing the alternate kinase. Additionally a comparative study can be done to rank performance between the different kinases.

### Example 9: Fusion to a Glycosylated Peptide to Increase Accumulation of Caseins in a Plant Cell

[0799] Certain genetic elements increase the secretion and stability of proteins in plant cells (Jia Li et al., Secretion of Active Recombinant Phytase from Soybean Cell-Suspension Cultures, 1997; Jianfeng Xu et al., High-Yields and Extended Serum Half-Life of Human Interferon a2b Expressed in Tobacco Cells as Arabinogalactan-Protein Fusions, 2007). Many aspects of plant growth involve hydroxyproline (Hyp)-rich glycoproteins (GRGPs). Accordingly, it was hypothesized that fusion of a casein to a glycoprotein tag could be used to increase accumulation of the casein in a plant cell. Table 41 shows examples of glycotags that can be used in recombinant milk protein production. Additional glycotags can be identified in Johnson, K. L., Cassin, A. M., Lonsdale, A., Bacic, A., Doblin, M. S., & Schultz, C. J. (2017). Pipeline to identify hydroxyproline-rich glycoproteins. Plant Physiology, 174(2), 886-903, see Table 91.

TABLE 41
Exemplary glycotags

| Glyto tag | Description |
|---|---|
| (SP)10 | Synthetic 10 tandem repeats of SP |
| (SP)20 | Synthetic 20 tandem repeats of SP |
| (SP)32 | Synthetic 32 tandem repeats of SP |
| (SP4)18 | Synthetic 18 tandem repeats of SPPPP |
| rabies glycoprotein (rgp) | glycoprotein of rabies virus |
| ANITVNITV | Synthetic glycopeptide |
| ANITVNITV | Synthetic glycopeptide |
| Protein or portion of a protein | |
| considered a hydroxyproline-rich | |
| glycoprotein containing motifs | |
| listed in the “Annotated HRGPs” | |
| tabs | |

SP repeats glycoprotein

[0800] In an initial experiment, a glycoprotein comprising 11 tandem SP repeats was identified from a native soybean protein (Glyma.02g204500), annotated as early nodulin-like protein 10. This tag, dubbed the (SP)11 tag, was codon optimized in IDT and fused to the N- or C-terminus of kappa-casein (See FIG. 25A-25C). The (SP)11-kappa-casein was then cloned into a binary Agrobacterium vector, and transformed into soy.

[0801] Notably, the expression of (SP)11-kappa-casein in the seeds was increased 13-fold over expression of kappa-casein alone (i.e., not fused with a glycoprotein tag). This data indicates that fusion with a glycoprotein tag can be used to increase accumulation of caseins in a plant cell.

### Prophetic Fusions of Other Disclosed Glycotags

[0802] Additional glycotags listed in table 41 will be tested in N- or C-terminal fusions with the milk proteins of the present disclosure. It is expected that fusions of these glycotags will increase expression of the milk protein.

### CD45 M-domain

[0803] In a similar experiment, the M domain of CD45 (receptor-type tyrosine-protein phosphatase C) was fused to kappa-casein (alternate caseins can be employed). The M domain is known to function as an ER-retention signal. Briefly, the M-domain from CD45 (Uniprot Accession No. P08575, amino acids Ala231 to Asp 290) was codon optimized using the Glycine max codon usage bias and fused to the N- or C-terminus of kappa-casein. In some constructs, a KDEL sequence was added to the C-terminus of the M-domain or the GOI (see FIG. 25E-25F). The fusion of the M domain to the C-terminus may cause ER retention of the fusion protein, leading to increased accumulation thereof in the cell.

[0804] Results of the CD45-Beta casein tetramer construct are shown below in Table 42.

TABLE 42
Results of glycoprotein fusion analysis

| | | Increased | Increased |
|---|---|---|---|
| | | fold vs BCN | fold vs. KCN |
| Glycosylation | CD45: B-Casein- | 12 | — |
| | tetramer | | |
| Glycosylation | SP tag: k-casein | — | 13 |

### Example 10: Cheese Composition Made with Beta-Casein Protein

[0805] To test whether a cheese composition having acceptable organoleptic and physical properties could be made using only beta-casein protein (i.e., without any other caseins), isolated beta casein from bovine milk was the sole casein protein used in the recipe below. The beta casein was provided in the form of a powder, comprising 84% protein with >98% purity of beta casein. An exemplary formulation for a 100% beta casein cheese is provided in Table 43.

TABLE 43
100% beta casein cheese composition

| Ingredient | Percent total |
|---|---|
| Water | 42.07% |
| Butter | 31.25% |
| Beta casein powder (84% protein) | 13.10% |
| Modified potato starch | 11.00% |
| Salt | 1.70% |
| Sodium citrate | 0.80% |
| Calcium chloride | 0.08% |

[0806] To make the cheese composition, all ingredients were added to a rapid visco analyzer (RVA) tube. The mixture was heated to 40° C. and mixed at 200 RPM for 2 minutes. The speed was increased to 500 RPM and mixed for an additional 3 minutes. The mixture was then allowed to rest for a minimum of 5 minutes before heating to 95° C. and mixing at 960 RPM for 1 minute. Then, the speed and temperature were reduced to 500 RPM and 90° C. for 1 minute. The temperature was reduced further to 85° C. and the composition was mixed for one more minute at 500 RPM. The hot cheese composition was poured into cylindrical molds (¾″ diameter pipe, 1″ in length with cap on bottom), covered with plastic wrap, and refrigerated for a minimum of 5 days. The target pH was 5.5 to 5.7, and was adjusted with lactic acid, citric acid, or sodium citrate. Meltability was analyzed as described below (see also the cheese labeled “D” in FIG. 28)

[0807] A cheese composition was also made with 50% beta casein protein and reduced amounts of other casein proteins using the following recipe shown in Table 44.

TABLE 44
50% Beta casein cheese composition

| Ingredient | Percent total |
|---|---|
| Water | 43.7% |
| Butter | 31.3% |
| Acid casein (95% protein dry basis) | 10.4% |
| Modified potato starch | 6.00% |
| Beta casein powder (84% protein) | 2.80% |
| Trisodium citrate | 1.70% |
| Salt | 1.70% |
| Sodium aluminum phosphate, basic | 1.70% |
| Citric acid | 0.70% |

[0808] To make the cheese composition, 60% of the water and all other ingredients were added to a RVA tube and heated to 50° C. and mixed at 500 RPM for 5 minutes. The remaining water was added to the RVA tube, and the mixture was heated to 95° C. and mixed at 960 RPM for 1 minute, then reduced to 500 RPM and 90° C. for 1 minute. The temperature was reduced to 85° C., and the composition was mixed at 500 RPM for one more minute. The hot cheese composition was poured into cylindrical molds (¾″ diameter pipe, 1″ in length with cap on bottom), covered with plastic wrap, and refrigerated for 5 days. The target pH was 5.5 to 5.7, and was adjusted with lactic acid, citric acid, or sodium citrate. For cheese analysis, see samples 3 and 4 of Table 49.

### Example 11: Cheese Composition Made with Kappa Casein Protein

[0809] To test whether a cheese composition having acceptable organoleptic and physical properties could be made using only kappa-casein protein (i.e., without any other casein proteins), isolated kappa casein from bovine was the sole casein protein used in the recipe below. The kappa-casein was provided in the form of a powder, which comprised 85% protein and greater than 70% purity of kappa casein. An exemplary formulation for a 100% kappa casein cheese is shown in Table 45.

TABLE 45
100% Kappa casein cheese composition

| Ingredient | Percent Total |
|---|---|
| Water | 45.0% |
| Butter | 31.3% |
| Kappa casein powder | 13.8% |
| Modified potato starch | 6.0% |
| Salt | 1.7% |
| Sodium citrate | 0.6% |
| Citric acid | 0.6% |
| Sodium aluminum phosphate (basic) | 0.9% |
| Calcium chloride | 0.1% |

[0810] All ingredients were added to a rapid visco analyzer (RVA) tube. The mixture was heated to 40° C. and mixed at 200 RPM for 2 minutes. The speed was increased to 500 RPM, and the composition was mixed for an additional 3 minutes. The mixture was then allowed to rest for a minimum of 5 minutes before heating to 95° C., and mixing at 960 RPM for 1 minute. Then, the speed and temperature were reduced to 500 RPM and 90° C. for 1 minute. The temperature was reduced further to 85° C., and the composition was mixed for one more minute at 500 RPM. The hot cheese composition was poured into cylindrical molds (¾″ diameter pipe, 1″ in length with cap on bottom), covered with plastic wrap, and refrigerated for 5 days. The target pH was 5.5 to 5.7 and was adjusted with lactic acid, citric acid, or sodium citrate. Meltability was analyzed as described below (see also the cheese labeled “B” in FIG. 28).

### Example 12: Cheese Composition Made with Alpha-Casein Protein

[0811] To test whether a cheese composition having acceptable organoleptic and physical properties could be made using only alpha-casein proteins, isolated alpha casein (a mixture of alpha-S1 and alpha-S2 caseins) from bovine was the sole casein protein used in the recipe below. The alpha-casein was provided in the form of a powder, which comprised approximately 87% protein and greater than 90% purity of alpha casein. An exemplary recipe for a 100% alpha casein cheese composition is provided below at Table 46.

TABLE 46
100% alpha casein cheese composition

| Ingredient | Percent Total |
|---|---|
| Water | 41.8% |
| Butter | 31.3% |
| Alpha casein powder | 12.6% |
| Modified potato starch | 11.0% |
| Salt | 1.7% |
| Sodium citrate | 0.8% |
| Citric acid | 0.2% |
| Sodium aluminum phosphate (basic) | 0.5% |
| Calcium chloride | 0.08% |

[0812] All ingredients were added to a rapid visco analyzer (RVA) tube. The mixture was heated to 40° C. and mixed at 200 RPM for 2 minutes. The speed was increased to 500 RPM, and the composition was mixed for an additional 3 minutes. The mixture was then allowed to rest for a minimum of 5 minutes before heating to 95° C. and mixing at 960 RPM for 1 minute. Then, the speed and temperature were reduced to 500 RPM and 90° C. for 1 minute. The temperature was reduced further to 85° C., and the composition was mixed for one more minute at 500 RPM. The hot cheese composition was poured into cylindrical molds (¾″ diameter pipe, 1″ in length with cap on bottom), covered with plastic wrap, and refrigerated for 5 days. The target pH was 5.5 to 5.7 and was adjusted with lactic acid, citric acid, or sodium citrate. Meltability was analyzed as described below.

### Example 13: Cheese Composition Made with Alpha- and Beta-Casein Proteins

[0813] To test whether a cheese composition having acceptable organoleptic and physical properties could be made using alpha- and beta-casein, alpha-casein and beta-casein powder obtained from bovine were used to create cheese compositions comprising 5000 alpha-casein and 50% beta-casein, 25% alpha-casein and 75% beta-casein, and 75% alpha-casein and 25% beta-casein, as shown in the recipes below at Table 47.

TABLE 47
Exemplary receipt for cheese composition
made with alpha- and beta-casein proteins

| | 50% | 25% | 75% |
|---|---|---|---|
| | alpha-casein | alpha-casein | alpha-casein |
| | and 50% | and 75% | and 25% |
| | beta-casein | beta-casein | beta-casein |
| Water | 42.0% | 41.8% | 42.0% |
| Butter | 31.3% | 31.3% | 31.3% |
| Modified potato starch | 10.5% | 10.5% | 10.5% |
| Alpha casein powder | 6.3% | 3.2% | 9.5% |
| Beta casein powder (84% | 6.5% | 9.8% | 3.3% |
| protein) | | | |
| Trisodium citrate | 0.9% | 0.9% | 0.9% |
| Salt | 1.7% | 1.7% | 1.7% |
| Sodium aluminum | 0.5% | 0.5% | 0.5% |
| phosphate, basic | | | |
| Citric acid | 0.2% | 0.2% | 0.2% |
| Calcium chloride | 0.08% | 0.08% | 0.08% |

[0814] To make the cheese composition, 60% of the water and all other ingredients were added to a RVA tube and heated to 50° C. The composition was then mixed at 500 RPM for 5 minutes. The remaining water was added, and the mixture was heated to 95° C. and mixed at 960 RPM for 1 minute. Then, the composition was mixed at 500 RPM at 90° C. for 1 minute. The temperature was reduced to 85° C., and the composition was mixed at 500 RPM for one more minute. The hot cheese composition was poured into cylindrical molds (¾″ diameter pipe, 1″ in length with cap on bottom), covered with plastic wrap, and refrigerated for 5 days. The target pH was 5.5 to 5.7, and was adjusted with lactic acid, citric acid, or sodium citrate. Meltability was analyzed as described below.

### Example 14: Cheese Composition Made with Beta- and Kappa-Casein Proteins

[0815] To test whether a cheese composition having acceptable organoleptic and physical properties could be made using beta- and kappa-casein, bovine kappa-casein and beta-casein powder were used to create two cheese compositions, one comprising 75% kappa casein and 25% beta casein, and another comprising 50% kappa casein and 50% beta casein, as shown in the recipes below at Table 48.

TABLE 48
Exemplary receipt for cheese composition
made with beta- and kappa-casein proteins

| | 75% kappa | 50% kappa |
|---|---|---|
| | casein and | casein and |
| | 25% beta casein | 50% beta casein |
| Water | 41.9% | 41.7% |
| Butter | 31.3% | 31.3% |
| Modified potato starch | 10.5% | 10.5% |
| Kappa casein powder | 9.7% | 6.5% |
| Beta casein powder (84% protein) | 3.3% | 6.6% |
| Trisodium citrate | 0.8% | 0.8% |
| Salt | 1.7% | 1.7% |
| Sodium aluminum phosphate, basic | 0.5% | 0.5% |
| Citric acid | 0.3% | 0.3% |
| Calcium chloride | 0.04% | 0.08 |

[0816] To make the cheese composition, 60% of the water and all other ingredients were added to a RVA tube and heated to 50° C. The composition was then mixed at 500 RPM for 5 minutes. The remaining water was added, and the mixture was heated to 95° C. and mixed at 960 RPM for 1 minute. Then, the composition was mixed at 500 RPM at 90° C. for 1 minute. The temperature was reduced to 85° C., and the composition was mixed at 500 RPM for one more minute. The hot cheese composition was poured into cylindrical molds (¾″ diameter pipe, 1″ in length with cap on bottom), covered with plastic wrap, and refrigerated for 5 days. The target pH was 5.5 to 5.7, and was adjusted with lactic acid, citric acid, or sodium citrate. Meltability was analyzed as described below (see also the cheeses labeled “A” and “C” in FIG. 28). Melt scores of the various cheese compositions are shown in FIG. 30 and stretch of cheese compositions is provided in FIG. 31.

### Example 15: Functional Properties of Cheese Compositions Made with Beta- and Kappa-Caseins

[0817] To test the organoleptic and physical properties, the cheese compositions were analyzed for various properties, including melt, stretch, firmness, and transparency. For the melting test, the cheeses were placed in a 450° F. oven for 5 minutes. A score of 0=no change from the initial appearance; 1=up to 25% coverage of pan; 2=25% to 50% pan coverage; 3=50% to 75% pan coverage; and 4=greater than 75% pan coverage. Shown in FIG. 28 are the results of the test with cheese compositions comprising (A) 75% kappa casein, 25% beta casein; (B) 100% kappa casein; (C) 50% kappa casein, 50% beta casein; and (D) 100% beta casein. Composition A had a melt score of 2; composition B was unchanged and therefore had a melt score of 0; composition C had a melt score of 3; and composition D exhibited the greatest meltability with a score of 4.

[0818] Additional cheese composition samples comprising different ratios of caseins and total protein were analyzed for stretchability and meltability after aging for a minimum of 5 days (Tables 49-51). Cheese composition stretch was measured by an assay testing the ability to stretch (cm in length) without breaking, after heating a 100 gram mass of the emulsion to a temperature of about 225° C. for 4 minutes and cooling to about 90° C. and pulling with a fork placed beneath the mass. Firmness and transparency were also observed by sensory evaluation (data not shown).

[0819] Shown in Table 49, below, are data collected from cheese compositions comprising between 11-11.5% protein, and in Table 50, data collected from cheese comprising between 13-13.500 protein. Compositions 1 and 2 comprise caseins at a ratio that is similar to the approximate percentages of caseins in bovine milk. Compositions 3, 4, 7, and 8 have levels of beta-casein higher than that found in milk, and compositions 5, 6, 8, 9, and 10 have levels of kappa-casein higher than that found in bovine milk.

TABLE 49
Stretch and melt of cheese compositions
comprising between 11-11.5% protein

| | Protein contribution (%) | | | | | |
|---|---|---|---|---|---|---|
| | Alpha-S1 + | | | | Stretch | CaCl₂ |
| | Alpha-S2 | Beta | Kappa | Melt | (cm) | (% w/w) |
| 1 | 50 | 37.5 | 12.5 | 4 | 5 | 0 |
| 2 | 50 | 37.5 | 12.5 | 4 | 8.5 | 0.25 |
| 3 | 40 | 50 | 10 | 3 | 5 | 0 |
| 4 | 40 | 50 | 10 | 3 | 8.5 | 0.25 |
| 5 | 43 | 32 | 25 | 4 | 6.5 | 0 |
| 6 | 43 | 32 | 25 | 3 | 3 | 0.25 |
| 7 | 0 | 100 | 0 | 4 | 20 | 0.4 |
| 8 | 0 | 50 | 50 | 3 | 17.5 | 0.08 |
| 9 | 0 | 25 | 75 | 2 | 0 | 0.04 |
| 10 | 0 | 0 | 100 | 0 | 0 | 0.12 |

TABLE 50
Stretch and melt of cheese compositions
comprising between 13-13.5% protein

| | Protein contribution (%) | | | | | |
|---|---|---|---|---|---|---|
| | Alpha-S1 + | | | | Stretch | CaCl₂ |
| | Alpha-S2 | Beta | Kappa | Melt | (cm) | (% w/w) |
| 1 | 50 | 37.5 | 12.5 | 3 | 5 | 0 |
| 2 | 50 | 37.5 | 12.5 | 2 | 5.5 | 0.25 |
| 3 | 34 | 57 | 9 | 2.5 | 5 | 0 |
| 4 | 34 | 57 | 9 | 3 | 5 | 0.25 |
| 5 | 39 | 32 | 29 | 3 | 4.5 | 0 |
| 6 | 39 | 32 | 29 | 2 | 4 | 0.25 |

[0820] As evidenced by the data above, cheese compositions made with beta-casein exhibited good melting and stretch after aging for at least five days. Use of the tested amounts of beta-casein also softened the cheese composition compared to standard casein ratios. The beta-casein cheese composition was affected by calcium level similar to that of the control cheese composition, and it was also found to be highly soluble. The cheese composition was substantially transparent when melted.

[0821] Kappa-casein imparted firmness to the cheese composition relative to standard casein ratios, but was more reactive to calcium than beta casein and control cheese compositions 1 and 2. Levels of less than 25% kappa casein did not impact stretch and stretch may improve slightly, whereas increasing levels of kappa casein restricted melt and reduced stretch after refrigeration for five days. Immediately after cooking, the 100% kappa casein cheese compositions can stretch to greater than 25 cm.

[0822] The alpha-caseins, alpha-S1-casein and alpha-S2-casein, are assumed to provide cheese firmness, as cheeses with depleted levels of alpha-S1-casein and alpha-S2-casein are softer than the control cheeses.

[0823] Cheese stretch was impacted by percent contribution of beta-casein. Specifically, increasing the amount of beta-casein correlated with an increase in stretch. As shown below, in Table 51 and FIG. 29, cheese compositions comprising, for example, 50% beta-casein had a stretch of 8.5 cm, whereas cheese comprising 100% beta-casein had a stretch of 20 cm. All cheese compositions comprised 11.5% total protein and CaCl₂).

TABLE 51
Cheese stretch with increasing contribution
of protein from beta-casein

| % beta-casein | Stretch (cm) |
|---|---|
| 37.5 | 8.5 |
| 50.0 | 8.5 |
| 66.7 | 7.5 |
| 83.3 | 11.5 |
| 100.0 | 20 |

### Example 16: Functional Properties of Additional Cheese Compositions

[0824] The analysis performed in Example 15 was repeated with additional compositions, as shown in Tables 52-54. The compositions comprised 100% beta-casein, 100% kappa-casein, or 10000 alpha-caseins, or mixtures thereof. The actual percent of protein by weight of the compositions varied between 10-11.75%, and the CaCl₂ concentration ranged from 000 to 0.16% (by weight). Melt, stretch, and firmness were determined as described above.

TABLE 52
Functional properties of additional cheese
compositions comprising only one casein

| | | | | | |
|---|---|---|---|---|---|
| % protein | % CaCl₂ | melt | stretch | firmness | pH |

100% Beta-casein

| | | | | | |
|---|---|---|---|---|---|
| 11.75 | 0 | 2 | 1.5 | very firm | 5.23 |
| 10 | 0 | 3 | 15 | soft | 5.28 |
| 10 | 0 | 3 | 0 | very soft | 5.6 |
| 11 | 0.04 | 4 | 6.5 | firm | 5.63 |
| 11 | 0.08 | 4 | 20 | firm | 5.55 |
| 11 | 0.08 | 3 | 6.5 | soft | 5.59 |

100% Kappa-casein

| | | | | | |
|---|---|---|---|---|---|
| 11.75 | 0.2 | 2 | 0 | firm | 5.65 |
| 11.75 | 0.12 | 3 | 0 | firm | 5.44 |
| 11.75 | 0.06 | 2 | 1.5 | firm | 5.67 |
| 11 | 0.04 | 2 | 0 | firm | 5.67 |
| 11.75 | 0.12 | 1 | 0 | firm | 5.06 |

100% Alpha-casein

| | | | | | |
|---|---|---|---|---|---|
| 11* | 0 | 3 | 0 | brittle | 6.01 |
| 11* | 0.08 | 3 | 0 | slightly soft | 5.8 |
| 11* | 0 | 3 | 0 | firm | 5.91 |
| 11* | 0.08 | 3 | 0 | firm | 5.9 |
| 11 | 0 | 2 | 0 | very firm | 6.26 |

*indicates that the compositions were undercooked

TABLE 53
Functional properties of additional cheese
compositions comprising mixtures of caseins
Beta-casein and Kappa-casein

| Sample | | | | | | | |
|---|---|---|---|---|---|---|---|
| No. | % beta | % kappa | % CaCl₂ | melt | stretch | firmness | pH |
| 1 | 5.5 | 5.5 | 0.04 | 4 | 7 | firm | 5.5 |
| 2 | 2.75 | 8.25 | 0.04 | 2 | 0 | very firm | 5.64 |
| 3 | 5.5 | 5.5 | 0.08 | 4 | 17.5 | firm | 5.36 |

Alpha-caseins and beta-casein

| | % alpha | % beta | % CaCl₂ | melt | stretch | firmness | pH |
|---|---|---|---|---|---|---|---|
| 1 | 5.5 | 5.5 | 0.16 | 4 | 0 | firm | 5.87 |
| 2 | 5.5 | 5.5 | 0.08 | 3 | 1.5 | firm | 6.01 |
| 3 | 5.5 | 5.5 | 0 | 3 | 1.5 | firm | 5.98 |
| 4 | 2.75 | 8.25 | 0.16 | 4 | 5 | firm | 5.94 |
| 5 | 2.75 | 8.25 | 0.08 | 3 | 1.5 | firm | 5.72 |
| 6 | 2.75 | 8.25 | 0 | 4 | 5.5 | firm | 5.68 |
| 7 | 8.25 | 2.75 | 0.16 | 3 | 0 | firm | 5.91 |
| 8 | 8.25 | 2.75 | 0.08 | 2 | 0 | firm | 5.92 |
| 9 | 8.25 | 2.75 | 0 | 2 | 0 | firm | 5.91 |

TABLE 54
Cheese melt and stretch with increasing
contribution of protein from beta-casein

| % Beta- | % Alpha- | % Kappa- | | Stretch |
|---|---|---|---|---|
| casein | caseins | casein | Melt | (cm) |
| 0 | 100 | 0 | 3 | 0 |
| 0 | 0 | 100 | 0 | 0 |
| 25 | 75 | 0 | 2 | 0 |
| 25 | 0 | 75 | 2 | 0 |
| 50 | 50 | 0 | 3 | 1.5 |
| 50 | 0 | 50 | 3 | 10.5 |
| 75 | 25 | 0 | 3 | 1.5 |
| 75 | 0 | 25 | 3 | 14.5 |
| 100 | 0 | 0 | 3 | 8.5 |

[0825] As shown by the data in Tables 52-54 above and FIGS. 30-31, beta-casein is the only casein that imparts both melt and stretch in a cheese composition under these conditions. Alpha caseins do not appear to impart stretch and do not significantly restrict melt. Alpha-caseins contribute to cheese firmness (data not shown). Kappa-casein also imparts firmness but negatively impacts melt. Like beta-casein it can contribute to stretch but only when combined with another protein.

### Example 17: Cheese Compositions with Beta-Lactoglobulin

[0826] To determine the effect of adding beta-lactoglobulin on the functional and organoleptic properties of the compositions, various cheese compositions were generated with different amounts of beta-lactoglobulin.

TABLE 55
Stretch and melt of cheese composition with the addition of beta-lactoglobulin
Protein contribution (%)

| Alpha- | | | | | | | |
|---|---|---|---|---|---|---|---|
| S1 + | | | | | | | |
| Alpha- | | | Beta | | % | | Stretch |
| S2 | Beta | Kappa | Lactoglobulin | Soy | Protein | Melt | (cm) |
| 50 | 37.5 | 12.5 | 0 | 0 | 11.5 | 4 | 5 |
| 39.8 | 29.8 | 9.9 | 20.5 | 0 | 11.5 | 3 | 0 |
| 39.8 | 29.8 | 9.9 | 0 | 20.5 | 11.5 | 4 | 4.5 |
| 50 | 37.5 | 12.5 | 0 | 0 | 13.2 | 3 | 8.5 |
| 34.6 | 26 | 8.7 | 30.8 | 0 | 13.2 | 2 | 0 |
| 34.6 | 26 | 8.7 | 0 | 30.8 | 13.2 | 3 | 0 |

Gram of protein/100 g of cheese

| | | | | | Total | | |
|---|---|---|---|---|---|---|---|
| AS1 + | | | | | Protein | | Stretch |
| AS2 | Beta | Kappa | BLG | Soy | (g.) | Melt | (cm) |
| 5.75 | 4.31 | 1.44 | 0.00 | 0.00 | 11.5 | 4 | 5 |
| 4.58 | 3.43 | 1.14 | 2.36 | 0.00 | 11.5 | 3 | 0 |
| 4.58 | 3.43 | 1.14 | 0.00 | 2.36 | 11.5 | 4 | 4.5 |
| 6.60 | 4.95 | 1.65 | 0.00 | 0.00 | 13.2 | 3 | 8.5 |
| 4.57 | 3.43 | 1.15 | 4.07 | 0.00 | 13.2 | 2 | 0 |
| 4.57 | 3.43 | 1.15 | 0.00 | 4.07 | 13.2 | 3 | 0 |

[0827] As shown in Table 55 above, at 20% and 3000 casein replacement levels, stretch was eliminated. Cheese composition melt, stretch, firmness were closer to the control with soy protein isolate compared to beta-lactoglobulin at both replacement levels tested.

[0828] Similar results were achieved with compositions comprising kappa-casein and beta-lactoglobulin (Table 56), beta-casein and beta-lactoglobulin (Table 57). The addition of beta-lactoglobulin to the cheese compositions softened them, restricted melt, and imparted an opacity due to protein aggregation.

TABLE 56
Stretch and melt of kappa-casein cheese composition
with the addition of beta-lactoglobulin
Kappa-casein + Beta-lactoglobulin

| % protein | % CaCl₂ | melt | stretch | firmness | pH | % BLG |
|---|---|---|---|---|---|---|
| 10 | 0.06 | 2 | 0 | firm | 5.95 | 2.5 |

TABLE 57
Stretch and melt of beta-casein cheese composition
with the addition of beta-lactoglobulin
Beta-casein + beta-lactoglobulin

| % protein | % CaCl₂ | melt | stretch | firmness | pH | % BLG |
|---|---|---|---|---|---|---|
| 10 | 0 | 3 | 0 | slightly | 5.43 | 2.5 |
| | | | | soft | | |
| | | | | (between | | |
| | | | | soft and | | |
| | | | | firm) | | |

### Example 18: Estimation of Apparent Viscosity

[0829] An exemplary milk composition comprising beta-casein as the only casein (BC milk), a yogurt composition comprising beta-casein as the only casein (BC yogurt), and an ice cream mix composition comprising beta-casein as the only casein (BC IC mix) are described in Table 58, below.

TABLE 58
Food compositions for viscosity analysis

| Ingredient | % |
|---|---|
| Beta casein milk | |
| Beta casein powder | 3.0 |
| Sodium citrate | 0.2 |
| Lactic acid (88%) | 0.1 |
| Sodium chloride | 0.2 |
| Calcium chloride | 0.2 |
| Palm oil | 3.3 |
| Soy lecithin | 0.2 |
| Glucose | 4.0 |
| Water | 88.9 |
| Beta casein yogurt (plain) | |
| Beta casein powder | 4.0 |
| Sodium citrate | 0.2 |
| Sodium chloride | 0.2 |
| Calcium chloride | 0.2 |
| Coconut oil | 4.0 |
| Soy lecithin | 0.3 |
| Modified tapioca starch | 3.5 |
| Glucose | 4.0 |
| Water | 83.6 |
| Beta casein ice cream mix | |
| Beta casein powder | 4.5 |
| Sodium citrate | 0.2 |
| Lactic acid (88%) | 0.1 |
| Sodium chloride | 0.2 |
| Tetrasodium pyrophosphate | 0.2 |
| Cocoa butter | 12.0 |
| Calcium sulfate | 0.2 |
| Mono & diglycerides | 0.5 |
| Cellulose gum | 0.2 |
| Sucrose | 20.0 |
| Vanilla extract | 0.5 |
| Water | 61.5 |

[0830] To make a BC milk composition, water is heated to 100-120° F., and lecithin and melted palm oil are added. Subsequently, the remaining ingredients (except lactic acid) are added with agitation and minimal air incorporation. The pH is adjusted to the range of 6.5-7.0 with lactic acid. The composition is then heated to 140° F. and homogenized (two stage, 2000 psi total). Then, the composition is heated to 175° F. and held at that temperature for 20 seconds before cooling to 40° F.

[0831] To make a BC yogurt composition, water is heated to 100-120° F., and lecithin and melted coconut oil are added. Subsequently, the remaining ingredients (except lactic acid) are added with agitation and minimal air incorporation. The pH is adjusted to the range of 6.5-7.0 with lactic acid. The composition is then heated to 140° F. and homogenized (two stage, 2000 psi total). Then, the composition is heated to 185° F. and held at that temperature for 5 minutes. The composition is then cooled to 110° F. and yogurt cultures are added. The composition is fermented at 108° F. until the pH is 4.6. The composition is then stirred and cooled to 40° F.

[0832] To make a BC IC composition, water is heated to 100-120° F., and lecithin and melted cocoa butter are added. Subsequently, the remaining ingredients (except lactic acid) are added with agitation and minimal air incorporation. The pH is adjusted to the range of 6.5-7.0 with lactic acid. The composition is then heated to 140° F. and homogenized (two stage, 2000 psi total). Then, the composition is heated to 175° F. and held at that temperature for 20 seconds before cooling to 40° F.

[0833] Theoretical approximations of the apparent viscosity for these BC milk, BC yogurt, and BC IC mix may be determined. Specifically, these approximations may be based on the rheological analysis of formulations made with bovine milk and adjustments made from observations made during the work with various cheese compositions described herein.

[0834] Approximations are shown in FIG. 32. The BC milk compositions are estimated to have an apparent viscosity of about 2 cP over all shear rates analyzed. In contrast, the BC yogurt and the BC IC mix compositions are estimated to have a higher apparent viscosity, which is expected to decrease at higher shear rates, characteristic of non-Newtonian compositions.

[0835] Taken together, this data indicates that the BC yogurt and BC IC mix compositions are expected to be non-Newtonian compositions.

### Example 19: Expression of a Fusion Protein Comprising Beta-Casein in E. Coli

[0836] To determine whether the fusion proteins of the disclosure may be detectably expressed in a bacterial system, a beta-casein tetramer (i.e., a fusion protein comprising four beta-caseins) was expressed in E. Coli. Specifically, the pET system (Novagen) was used for the cloning and expression of the proteins of interest in E. coli. A DNA sequence encoding the beta-casein tetramer was PCR amplified and cloned into the NcoI and BlpI sites of pET-28a (+) expression vector via In-Fusion (Takara) cloning. The ligated vector was transformed into Stellar™ competent cells. Subsequently, the DNA of positive clones was used to transform BL21-CodonPlus strain (Agilent Technologies) which encodes a T7 RNA polymerase under control of the lacUV5 promoter for easy expression.

[0837] To induce protein expression, an overnight culture grown to stationary phase was diluted (1/100) and then grown to mid-log phase (OD600-0.4-0.6). The mid-log phase culture was pelleted, and the supernatant was removed. Protein expression was induced by the addition of IPTG (0.5 mM final concentration) to the pellet, and the cells were incubated for 3 hours at 37° C. with 160 rpm shaking. To extract the proteins of interest, the BugBuster® (Novagen) master mix was utilized following the manufacturer's instructions with the addition HALT protease inhibitor. The proteins were separated using SDS-PAGE and transferred to nitrocellulose membrane. The fusion protein was detected using a primary antibody raised against beta-casein.

[0838] As shown in FIG. 33, the beta-casein tetramer (BC4) accumulated to detectable levels in E. Coli. Lanes 1-5 of FIG. 33 show wildtype E. coli extracts with commercial beta-casein protein spiked in at 0, 5, 10, 20 and 40 ng per lane, as a standard. Lane 6 shows molecular weight markers. Lane 7 shows Beta-casein tetramer expressed in E. Coli after 3 h of induction with IPTG.

### Example 20: Expression of a Fusion Protein Comprising Beta-Casein in Tobacco Leaves

[0839] To determine whether the fusion proteins of the disclosure may be detectably expressed in a tobacco system, a fusion protein comprising beta-casein fused to beta-lactoglobulin was expressed in tobacco leaves.

[0840] A DNA sequence encoding a fusion protein comprising, from N-terminus to C-terminus, beta-lactoglobulin and beta-casein, was inserted into the AR17 vector backbone in between a double 35S promoter and EUT:Rb7T double terminator. The plasmid was transformed into agrobacterium strain AGL1 and the positive agrobacterium colonies were cultured overnight in selective media. To prepare the infiltration solution, the agrobacterium culture was precipitated by centrifugation at 1,000 g for 10 mins and resuspended in equal volume of the infiltration medium (50 mM MES, 2 mM Na₃PO₄, 5 mg/mL D-glucose and 0.1 mM acetosyringone). This washing step was repeated a second time.

[0841] The fusion protein expressing strain was co-infiltrated in tobacco leaves with the post-translational gene silencing inhibitor p19 strain and the protease inhibitor NbPR4 strain to enhance the fusion protein expression. Concentration of the fusion protein expressing-strain, and strains p19 and NbPR4, was adjusted to an optical density (OD) of 1, 0.5 and 0.5 respectively, immediately before co-infiltration into the leaves. Six to eight-week-old Nicothiana benthamiana plants were used for infiltrations. Four different fully expanded leaves were infiltrated as biological replicates.

[0842] Protein samples were harvested three days after infiltration. Total soluble proteins were extracted with equal volume of extraction buffer (1×PBS PH7.4, 5 mM DTT, 0.1% Tween20 and 1×HALT protease inhibitors). Total protein concentrations were measured using Pierce 660 reagent. To visualize the target protein expression, 1 ug of total soluble protein were separated on SDS-PAGE, transferred to nitrocellulose membrane, and probed with a beta-casein primary antibody.

[0843] Results are shown in FIG. 34. Lanes 1-5 show wild type tobacco protein extracts spiked with 0, 0.5, 1, 2, or 4 nanograms of commercially available beta-casein. Lane 6 shows molecular weight markers. Lanes 7-8 shows infiltration of tobacco leaves with the fusion protein. This data shows that the fusion protein accumulated in tobacco leaves at a level above 4% total soluble protein.

### Example 21: Protease Knock Out or Expression of Protease Inhibitors in Plants to Reduce or Eliminate Degradation of Transgenically Expressed Proteins

[0844] The prediction software PROSPER was used to elucidate families of proteases that might be responsible for the degradation of transgenically expressed proteins and to generate a list of proteases and protease inhibitors for use in the generation of knock out lines or for the co-expression of a protease inhibitor with a protein to be transgenically expressed, for example as in FIG. 11B. The proteases cysteine, aspartic, and serine were identified as being highly expressed in soybean seeds.

### Generation of Protease Knock Out Lines

[0845] Transcriptome and proteomic data was utilized to identify highly expressed serine, cysteine and aspartic proteases for use in protease knock-out lines or to generate constructs to inhibit them. The protease inhibitors are shown in Table 59.

TABLE 59
Exemplary protease inhibitors

| | Nucleic Acid | Amino Acid |
|---|---|---|
| Protease | SEQ ID NO | SEQ ID NO |
| SICYS8 | 945 | 946 |
| CID | 947 | 948 |
| BB | 949 | 950 |
| API5 | 951 | 952 |
| KTi3 | 953 | 954 |

Co-delivery of protease inhibitors with a transgenic protein

[0846] As protease activity is pH dependent, some families of proteases reside in different cellular compartments. For example, aspartic protease families are abundant in the endoplasmic reticulum (ER), thus, degradation of transgenically expressed proteins can be reduced by co-expression of an aspartic protease inhibitor with the transgenic protein. Transgenically expressed proteins can be targeted to the ER by way of a KDEL addition. Therefore, constructs were generated to co-express a protease inhibitor and a transgenic milk protein. In summary, proteases were selected based on their expression level, expression pattern during seed development, and the family of proteases that they belong to with the focus on aspartic, cysteine and serine proteases. In the case of the protease inhibitors, inhibitors that target the most highly expressed proteases were selected. Table 60 below shows exemplary proteases and example inhibitors.

TABLE 60
Exemplary proteases and inhibitors of the same

| | | | | | DNA | Protein |
|---|---|---|---|---|---|---|
| | | | | | Sequence | Sequence |
| | | | | | SEQ ID | SEQ ID |
| | Identification | Gene ID | Type | Strategy | NO | NO |
| Protease 1 | Peptidase A1 | Glyma.04g091800 | Aspartic-type | Knock-out | 917 | 918 |
| | domain- | | protease | | | |
| | containing | | | | | |
| | protein | | | | | |
| Protease 2 | Peptidase A1 | Glyma.02g213000 | Aspartic-type | Not | 919 | 920 |
| | domain- | | protease | selected | | |
| | containing | | | | | |
| | protein | | | | | |
| Protease 3 | Cysteine | Glyma.10g207100 | Cysteine | Knock-out | 921 | 922 |
| | proteinase | | protease | | | |
| Protease 4 | 34 kDa | Glyma.08g116300 | Cysteine | Knock-out | 923 | 924 |
| | maturing seed | | protease | | | |
| | protein | | | | | |
| Protease 3 | Cysteine | | Cysteine | Knock-out | 925 | 926 |
| and 4 | proteinase/34 | | protease | | | |
| (Simultaneous | kDa maturing | | | | | |
| KO) | seed protein | | | | | |
| Protease 5 | Uncharacterized | Glyma.06g275300 | Cysteine | Not | 927 | 928 |
| | protein | | protease | selected | | |
| Protease 7 | Carboxypeptidase | Glyma.09g226700 | Serine-type | Not | 929 | 930 |
| | | | protease | selected | | |
| Protease 8 | Carboxypeptidase | Glyma.03g125400 | Serine-type | Not | 931 | 932 |
| | | | protease | selected | | |
| Protease 9 | Serine-Type | Glyma.17g164100 | Serine-type | Knock-out | 933 | 934 |
| | protease | | protease | | | |
| SICYS8 | Cystatine | Glyma08g45530 | Cysteine | Co- | 935 | 936 |
| | | | protease | expression | | |
| | | | inhibitor | | | |
| CID | Cathepsin D | X73986 | Aspartic | Co- | 937 | 938 |
| | inhibitor | | protease | expression | | |
| | | | inhibitor | | | |
| BB | Bowman-Birk | Glyma16g33400 | Trypsin- | Co- | 939 | 940 |
| | inhibitor D-II | | chymotrypsin | expression | | |
| | | | inhibitor | | | |
| API5 | Aspartic | MH686153.1 | Aspartic | Co- | 941 | 942 |
| | Protease | | Protease | expression | | |
| | Inhibitor 5 | | Inhibitor | | | |
| KTi3 | Kunitz-Trypsin | Glyma08g45530 | Trypsin | Co- | 943 | 944 |
| | inhibitor | | inhibitor | expression | | |

[0847] Constructs for protease knock out or for co-expression with protease inhibitors were designed, see Table 61.

TABLE 61
Exemplary designs for protease knock-out or co-expression

| | | Protein(s) |
|---|---|---|
| Plasmid ID | Cassette detail | abbreviation |
| AR14-07 | Cas9(KO Protease1)(GmSeed2:sig2:OBC-T3:OBC-T2:OKC1-T:OLG1:AtHSP T:AtUbi10T) | BC-BC-KCN-LG |
| AR14-08 | Cas9(KO Protease3)(GmSeed2:sig2:OBC-T3:OBC-T2:OKC1-T:OLG1:AtHSP T:AtUbi10T) | BC-BC-KCN-LG |
| AR14-09 | Cas9(KO Protease4)(GmSeed2:sig2:OBC-T3:OBC-T2:OKC1-T:OLG1:AtHSP T:AtUbi10T) | BC-BC-KCN-LG |
| AR14-10 | Cas9(KO Protease5)(GmSeed2:sig2:OBC-T3:OBC-T2:OKC1-T:OLG1:AtHSP T:AtUbi10T) | BC-BC-KCN-LG |
| AR14-11 | Cas9(KO Protease9)(GmSeed2:sig2:OBC-T3:OBC-T2:OKC1-T:OLG1:AtHSP T:AtUbi10T) | BC-BC-KCN-LG |
| AR14-12 | Cas9(KO Protease3&4)(GmSeed2:sig2:OBC-T3:OBC-T2:OKC1-T:OLG1:AtHSP T:AtUbi10T) | BC-BC-KCN-LG |
| AR14-14 | Cas9(KO Protease1)(GmSeed2:sig2:OBC-T5:OBC-T4:OBC-T3:OBC-T2:AtHSP T:AtUbi10T) | BC-BC-BC-BC |
| AR14-18 | Cas9(KO Protease9)(GmSeed2:sig2:OBC-T5:OBC-T4:OBC-T3:OBC-T2:AtHSP T:AtUbi10T) | BC-BC-BC-BC |
| AR14-19 | Cas9(KO Protease3&4) - (GmSeed2:sig2:OBC-T5:OBC-T4:OBC-T3:OBC-T2:AtHSP T:AtUbi10T) | BC-BC-BC-BC |
| AR14-14 | Cas9(KO Protease1)(GmSeed2:sig2:OBC-T5:OBC-T4:OBC-T3:OBC-T2:AtHSP T:AtUbi10T) | BC-BC-BC-BC |
| AR14-15 | Cas9(KO Protease3)(GmSeed2:sig2:OBC-T5:OBC-T4:OBC-T3:OBC-T2:AtHSP T:AtUbi10T) | BC-BC-BC-BC |
| AR14-16 | Cas9(KO Protease4)(GmSeed2:sig2:OBC-T5:OBC-T4:OBC-T3:OBC-T2:AtHSP T:AtUbi10T) | BC-BC-BC-BC |
| AR14-17 | Cas9(KO Protease5)(GmSeed2:sig2:OBC-T5:OBC-T4:OBC-T3:OBC-T2:AtHSP T:AtUbi10T) | BC-BC-BC-BC |
| AR14-18 | Cas9(KO Protease9)(GmSeed2:sig2:OBC-T5:OBC-T4:OBC-T3:OBC-T2:AtHSP T:AtUbi10T) | BC-BC-BC-BC |
| AR14-19 | Cas9(KO Protease3&4) - (GmSeed2:sig2:OBC-T5:OBC-T4:OBC-T3:OBC-T2:AtHSP T:AtUbi10T) | BC-BC-BC-BC |
| AR15-340 | (GmSeed2:sig2:OBC-T5:OBC-T4:OBC-T3:OBC-T2:AtHSP T:AtUbi10T) | BC-BC-BC-BC/CYS |
| | (PvPhas:arcUTR:sig10:SICYS8:arcT) | |
| AR15-341 | (GmSeed2:sig2:OBC-T5:OBC-T4:OBC-T3:OBC-T2:AtHSP T:AtUbi10T) | BC-BC-BC-BC/CYS |
| | (GmCEP1:sig12:SICYS8:arcT) | |
| AR15-342 | (GmSeed2:sig2:OBC-T5:OBC-T4:OBC-T3:OBC-T2:AtHSP T:AtUbi10T) | BC-BC-BC-BC/CYS |
| | (GmGRD:sig12:SICYS8:arcT) | |
| AR15-343 | (GmSeed2:sig2:OBC-T3:OBC-T2:OKC1-T:OLG1:AtHSP T:AtUbi10T) | BC-BC-KCN-LG/CYS |
| | (PvPhas:arcUTR:sig10:SICYS8:arcT) | |
| AR15-344 | (GmSeed2:sig2:OBC-T3:OBC-T2:OKC1-T:OLG1:AtHSP T:AtUbi10T) | BC-BC-KCN-LG/CYS |
| | (GmCEP1:sig12:SICYS8:arcT) | |
| AR15-345 | (GmSeed2:sig2:OBC-T3:OBC-T2:OKC1-T:OLG1:AtHSP T:AtUbi10T) | BC-BC-KCN-LG/CYS |
| | (GmGRD:sig12:SICYS8:arcT) | |
| AR15-347 | (GmSeed2:sig2:OBC-T4:OBC-T3:OBC-T2:OKC1-T:OLG1:AtHSP T:AtUbi10T) | BC-BC-BC-KCN- |
| | (PvPhas:arcUTR:sig10:SICYS8:arcT) | LG/CYS |
| AR15-348 | (GmSeed2:sig2:OBC-T4:OBC-T3:OBC-T2:OKC1-T:OLG1:AtHSP T:AtUbi10T) | BC-BC-BC-KCN- |
| | (GmCEP1:sig12:SICYS8:arcT) | LG/CYS |
| AR15-349 | (GmSeed2:sig2:OBC-T4:OBC-T3:OBC-T2:OKC1-T:OLG1:AtHSP T:AtUbi10T) | BC-BC-BC-KCN- |
| | (GmGRD:sig12:SICYS8:arcT) | LG/CYS |
| AR15-379 | (GmSeed2:sig2:OBC-T5:OBC-T4:OBC-T3:OBC-T2:AtHSP T:AtUbi10T) | BC-BC-BC-BC/CYS |
| | (GmTHIC:sig12:SICYS8:arcT) | |
| AR15-380 | (GmSeed2:sig2:OBC-T3:OBC-T2:OKC1-T:OLG1:AtHSP T:AtUbi10T) | BC-BC-KCN-LG/CYS |
| | (GmTHIC:sig12:SICYS8:arcT) | |
| AR15-381 | (GmSeed2:sig2:OBC-T4:OBC-T3:OBC-T2:OKC1-T:OLG1:AtHSP T:AtUbi10T) | BC-BC-BC-KCN- |
| | (GmTHIC:sig12:SICYS8:arcT) | LG/CYS |
| AR15-462 | (GmSeed2:sig2:OBC-T5:OBC-T4:OBC-T3:OBC-T2:AtHSP T:AtUbi10T) | BC-BC-BC-BC/CID |
| | (PvPhas:arcUTR:sig10:SICID:arcT) | |
| AR15-463 | (GmSeed2:sig2:OBC-T3:OBC-T2:OKC1-T:OLG1:AtHSP T:AtUbi10T) | BC-BC-KCN-LG/CID |
| | (PvPhas:arcUTR:sig10:SICID:arcT) | |
| AR15-464 | (GmSeed2:sig2:OBC-T5:OBC-T4:OBC-T3:OBC-T2:AtHSP T:AtUbi10T) | BC-BC-BC-BC/BB |
| | (PvPhas:arcUTR:sig10:GmBBID-II.1:arcT) | |
| AR15-465 | (GmSeed2:sig2:OBC-T3:OBC-T2:OKC1-T:OLG1:AtHSP T:AtUbi10T) | BC-BC-KCN-LG/BB |
| | (PvPhas:arcUTR:sig10:GmBBID-II.1:arcT) | |
| AR15-466 | (GmSeed2:sig2:OBC-T5:OBC-T4:OBC-T3:OBC-T2:AtHSP T:AtUbi10T) | BC-BC-BC-BC/API5 |
| | (PvPhas:arcUTR:sig10:StAPI5:arcT) | |
| AR15-467 | (GmSeed2:sig2:OBC-T3:OBC-T2:OKC1-T:OLG1:AtHSP T:AtUbi10T) | BC-BC-KCN- |
| | (PvPhas:arcUTR:sig10:StAPI5:arcT) | LG/API5 |
| AR15-468 | (GmSeed2:sig2:OBC-T5:OBC-T4:OBC-T3:OBC-T2:KDEL:AtHSP T:AtUbi10T) | BC-BC-BC-BC/API5 |
| | (PvPhas:arcUTR:sig10:StAPI5:KDEL:arcT) | |
| AR15-469 | (GmSeed2:sig2:OBC-T3:OBC-T2:OKC1-T:OLG1:KDEL:AtHSP T:AtUbi10T) | BC-BC-KCN- |
| | (PvPhas:arcUTR:sig10:StAPI5:KDEL:arcT) | LG/API5 |
| AR15-470 | (GmSeed2:sig2:OBC-T5:OBC-T4:OBC-T3:OBC-T2:KDEL:AtHSP T:AtUbi10T) | BC-BC-BC-BC/CID |
| | (PvPhas:arcUTR:sig10:SICID:KDEL:arcT) | |
| AR15-471 | (GmSeed2:sig2:OBC-T3:OBC-T2:OKC1-T:OLG1:KDEL:AtHSP T:AtUbi10T) | BC-BC-KCN-LG/CID |
| | (PvPhas:arcUTR:sig10:SICID:KDEL:arcT) | |

[0848] Exemplary constructs from Table 61 above encoding for BC-BC-BC-BC; or BC-BC-KCN-LG configured to co-express with a protease inhibitor or CRJSPR system for protease knock out were employed and the percent accumulation of the respective recombinant milk protein was determined. Table 62 and Table 63 show fold expression as compared to control beta casein. The data sets are from constructs which were expressed in the same cultivar (SA14) and selected specifically for TO plants with one or two gene copies of the plasmid.

TABLE 62
Fold expression as compared to beta casein for BC-BC-BC-BC constructs

| | | | | Percent of events that had fold | |
|---|---|---|---|---|---|
| Plasmid | | Protein(s) | | increase of (compared to BC): | |
| ID | Cassette detail | abbreviation | Design | 0-17 fold | >17 fold |
| AR15-231 | GmSeed2:sig2:OBC-T5:OBC-T4:OBC- | BC-BC-BC- | — | 96.2% | 3.8% |
| | T3:OBC-T2:AtHSP T:AtUbi10T | BC | | | |
| AR14-14 | Cas9(KO Protease1)(GmSeed2:sig2:OBC- | BC-BC-BC- | KO Protease1- | 57.1% | 42.9% |
| | T5:OBC-T4:OBC-T3:OBC-T2:AtHSP | BC | Peptidase A1 | | |
| | T:AtUbi10T) | | domain-containing | | |
| AR14-18 | Cas9(KO Protease9)(GmSeed2:sig2:OBC- | BC-BC-BC- | KO Protease9- | 20.0% | 80.0% |
| | T5:OBC-T4:OBC-T3:OBC-T2:AtHSP | BC | serine-type protease | | |
| | T:AtUbi10T) | | | | |
| AR14-19 | Cas9(KO Protease3&4) - | BC-BC-BC- | KO Protease3&4 | 25.0% | 75.0% |
| | (GmSeed2:sig2:OBC-T5:OBC-T4:OBC- | BC | | | |
| | T3:OBC-T2:AtHSP T:AtUbi10T) | | | | |
| AR15-341 | (GmSeed2:sig2:OBC-T5:OBC-T4:OBC- | BC-BC-BC- | Coexpression of the | 0.0% | 100.0% |
| | T3:OBC-T2:AtHSP T:AtUbi10T) | BC/CYS | protease inhibitor | | |
| | (GmCEP1:sig12:SICYS8:arcT) | | CYS (GmCEP) | | |
| AR15-342 | (GmSeed2:sig2:OBC-T5:OBC-T4:OBC- | BC-BC-BC- | Coexpression of the | 20.0% | 80.0% |
| | T3:OBC-T2:AtHSP T:AtUbi10T) | BC/CYS | protease inhibitor | | |
| | (GmGRD:sig12:SICYS8:arcT) | | CYS (GmGRD) | | |

TABLE 63
Fold expression as compared to beta casein for BC-BC-KCN-LG constructs

| | | | | Percent of events that had fold | |
|---|---|---|---|---|---|
| Plasmid | | Protein(s) | | increase of (compared to BC): | |
| ID | Cassette detail | abbreviation | Design | 0-60 fold | >60 fold |
| AR15-233 | GmSeed2:sig2:OBC-T3:OBC-T2:OKC1- | BC-BC-KCN- | — | 68.4% | 31.6% |
| | T:OLG1:AtHSP T:AtUbi10T | LG | | | |
| AR14-07 | Cas9(KO Protease1)(GmSeed2:sig2:OBC- | BC-BC-KCN- | KO Protease1- | 20.0% | 80.0% |
| | T3:OBC-T2:OKC1-T:OLG1:AtHSP | LG | Peptidase A1 | | |
| | T:AtUbi10T) | | domain-containing | | |
| | | | protein | | |
| AR14-08 | Cas9(KO Protease3)(GmSeed2:sig2:OBC- | BC-BC-KCN- | KO Protease3- | 0.0% | 100.0% |
| | T3:OBC-T2:OKC1-T:OLG1:AtHSP | LG | Cysteine proteinase | | |
| | T:AtUbi10T) | | | | |
| AR14-09 | Cas9(KO Protease4)(GmSeed2:sig2:OBC- | BC-BC-KCN- | KO Protease 4- 34 | 25.0% | 75.0% |
| | T3:OBC-T2:OKC1-T:OLG1:AtHSP | LG | kDa maturing seed | | |
| | T:AtUbi10T) | | protein | | |
| AR14-12 | Cas9(KO Protease3&4)(GmSeed2:sig2:OBC- | BC-BC-KCN- | KO Protease3&4 | 33.3% | 66.7% |
| | T3:OBC-T2:OKC1-T:OLG1:AtHSP | LG | | | |
| | T:AtUbi10T) | | | | |
| AR15-343 | (GmSeed2:sig2:OBC-T3:OBC-T2:OKC1- | BC-BC-KCN- | Coexpression of | 37.5% | 62.5% |
| | T:OLG1:AtHSP T:AtUbi10T) | LG/CYS | protease inhibitor | | |
| | (PvPhas:arcUTR:sig10:SICYS8:arcT) | | CYS (PvPhas) | | |
| AR15-344 | (GmSeed2:sig2:OBC-T3:OBC-T2:OKC1- | BC-BC-KCN- | Coexpression of the | 0.0% | 100.0% |
| | T:OLG1:AtHSP T:AtUbi10T) | LG/CYS | protease inhibitor | | |
| | (GmCEP1:sig12:SICYS8:arcT) | | CYS (GmCEP) | | |
| AR15-345 | (GmSeed2:sig2:OBC-T3:OBC-T2:OKC1- | BC-BC-KCN- | Coexpression of the | 0.0% | 100.0% |
| | T:OLG1:AtHSP T:AtUbi10T) | LG/CYS | protease inhibitor | | |
| | (GmGRD:sig12:SICYS8:arcT) | | CYS (GmGRD) | | |

### Example 22: Higher Yield of Milk Protein Produced Per Acre of Engineered Plants

[0849] The genetically engineered plants of the disclosure will enable the production of recombinant milk proteins at significant quantities per acre.

[0850] For example, the concentration of total protein per soybean seed is generally in the range of 33% to 39%, with an approximate mean of 35% (but studies indicate that the range can be from around 27% to around 45%).

[0851] The genetic modifications taught in the present disclosure are able to achieve a range of expression levels of recombinant milk protein in a genetically modified seed, as a percentage of total protein per soybean seed.

[0852] Assuming a mean of 35% total protein per soybean seed, then the below Table 64 illustrates pounds of recombinant milk protein per acre, at different expression levels and soybean yield rates, which are achievable utilizing the genomic engineering techniques taught herein.

[0853] To construct Table 64, the following formula was utilized: (Y Bushels/acre)×(60 pounds soybeans/bushel)×(35 pounds total protein/100 pounds soybeans)×(E pounds recombinant protein/100 pounds total protein)=pounds of recombinant protein per acre, where E is the expression level of the recombinant protein and Y is the yield of soybeans per acre.

[0854] Further, based on the above formula, one can derive the following formula that gives the amount of recombinant protein produced per seed: (1 pound soybeans/2800 soybeans)×(35 pounds total protein/100 pounds soybeans)×(E pounds recombinant protein/100 pounds total protein)×(453600 mg/lb)=mg recombinant protein per seed. For example, if using a 1% expression level, then the equation would be: (1 pound soybeans/2800 soybeans)×(35 pounds total protein/100 pounds soybeans)×(1 pounds recombinant protein/100 pounds total protein)×(453600 mg/lb)=0.56 mg recombinant protein per seed. This is assuming 162 mg average for a soybean seed. If, however, one had a lower average weight of soybean seed, then the recombinant protein produced per seed would be different. For instance, consider an average seed weight of 100 mg, with 1% expression level, with 35% protein content, would give 0.35 mg recombinant protein per seed. One of skill in the art would be able to utilize the formula taught herein to determine the recombinant protein produced per seed.

[0855] The USDA's National Agricultural Statistics Service (USDA NASS) estimates that the average soybean yield per acre across the United States was 50.2 bushels per acre in 2020. Specifically, soybean production for 2020 totaled 4.14 billion bushels, up 16% from 2019. With record high yields in Indiana, Kentucky, Mississippi, Missouri, New Jersey, and Tennessee, and the average soybean yield is estimated at 50.2 bushels per acre, 2.8 bushels above 2019.

[0856] Thus, as an example, assuming an average 50 bushel per acre crop, and an engineered soybean plant that expresses 5.0% recombinant milk protein (assuming a mean total protein content of 35% per soybean seed), then one would achieve 52.5 pounds of recombinant milk protein per acre, utilizing the genetic modifications taught herein (relevant row shaded grey and relevant cell bolded below in Table 64).

Determination of recombinant protein weight in transgenic seeds

[0857] Transgenic seed crops are collected for determination of recombinant protein weight. Seeds are processed as previously described and total protein weight of seed mass is determined. For example seeds will be macerated, and soluble protein will be extracted via alcohol or acid precipitation. Total protein weight will be measured, and relative content of milk proteins and second proteins will be measured to calculate weight yield, and relative content of proteins of interest.

### Example 23: Coloring of the Testa with Anthocyanin

[0858] The testa of soybean, FIG. 38, is colored with anthocyanin to allow tracing and/or identification of transgenic plants (e.g., soybean). Similar methods can be applied to additional pigments or metabolites including but not limited to flavonoids, carotenoids, alkaloids.

[0859] An exemplary pigment accumulation site is the palisade layer of the testa. Accumulation in the parenchyma layer might also be done. Based on the public transcriptome analysis of seventeen compartments of the early maturation stage of the soybean seeds (GE46096), 12 seed coat specific genes were selected with specific expression in the palisade layer, parenchyma layer or full seed coat layers. qPCR was carried out to validate the expressions of the selected genes and 9 out of the 12 promoters were chosen to drive the expression of components of the pigmentation cassette, Table 65.

TABLE 65
Exemplary seed coat specific promoters

| | | | | | Chosen |
|---|---|---|---|---|---|
| SEQ | | Gene | | Seed Coat | for |
| ID | Gene ID | Name | Description | Layer | soybean |
| 861 | Glyma11g03010 | GmANS3 | Anthocyanin | Palisade | Yes |
| | | | Synthase 3 | Layer | |
| 862 | Glyma01g42350 | GmANS2 | Anthocyanin | Palisade | Yes |
| | | | Synthase 2 | Layer | |
| 863 | Glyma03g40310 | GmPAL1 | Function unknown | Palisade | No |
| | | | protein | Layer | |
| 864 | Glyma01g26230 | GmTAU8 | Glutathione S- | Palisade | Yes |
| | | | transferase 8 | Layer | |
| 865 | Glyma14g07940 | GmDFR1 | Dihydroflavonol-4- | Palisade | Yes |
| | | | reductase 1 | Layer | |
| 866 | Glyma06g00680 | GmPAL2 | Function unknown | Palisade | Yes |
| | | | protein | Layer | |
| 867 | Glyma07g28940 | GmSCB1 | Seed Coat BURP- | Parenchyma | Yes |
| | | | domain protein 1 | Layer | |
| 868 | Glyma08g19580 | GmSAG29 | Senescence | Parenchyma | Yes |
| | | | associated gene 29- | Layer | |
| | | | like | | |
| 869 | Glyma06g02500 | GmSCS1 | Seed Coat | Parenchyma | Yes |
| | | | Subtilisin 1 | Layer | |
| 870 | Glyma14g34480 | GmBX | Beta-glucosidase | Parenchyma | No |
| | | | | Layer | |
| 871 | Glyma09g30910 | GmBG | Xylan 1 4-beta- | Parenchyma | No |
| | | | xylosidase | Layer | |
| 872 | Glyma06g42780 | GmCEP1S | KDEL-tailed | Parenchyma | Yes |
| | | | cysteine | Layer | |
| | | | endopeptidase | | |
| | | | CEP1-like | | |

### Transformation Strategies

[0860] To modify a testa to express anthocyanin three or four transformation strategies can be employed: design of an anthocyanin-expressing cassette and dairy-expressing cassette in the same T-DNA so the two traits will co-segregate, as shown in FIG. 36A; generation of a stable pigmented line that will be crossed with a stable high dairy-expressing line, as depicted in FIG. 361B; generation of a stable pigmented line that will be re-transformed with the construct containing the dairy-expressing cassette; or generation of a stable dairy-expressing line that will be re-transformed with the construct containing the pigmentation cassette.

### Molecular Strategies to Induce Pigmentation

[0861] Strategy 1: Overexpression of AHB transcription factors (TTs) in the seed coat

[0862] Seven MYB transcription factors that induce anthocyanin accumulation in plants were selected to be expressed behind the testa specific promoters of Table 65.

TABLE 66
Selected MYB and bHLH transcription factor genes

| Nucleic Acid | | | | | |
|---|---|---|---|---|---|
| SEQ ID; and | | | | | |
| Amino Acid | | | | | Chosen |
| SEQ ID, | | | | | for |
| respectively | Gene ID | Gene Name | Description | Species | soybean |
| 873; 880 | AT1G56650 | AtMybA | R2R3-MYB TF | Arabidopsis | Yes |
| | | | Arabidopsis | thaliana | |
| 874; 881 | KT992776 | MoroMybA | R2R3-MYB TF | Blood orange | Yes |
| | | | Blood Orange | (Citrus sinensis) | |
| 875; 882 | JX470201 | VvMybA | R2R3-MYB TF | Grape | Yes |
| | | | Grape | (Vitis vinifera) | |
| 876; 883 | KT992773 | PamMybA.1 | R2R3-MYB TF | Plum | Yes |
| | | | Plum | (Prunus americana) | |
| 877; 884 | KT992775 | PamMybA.5 | R2R3-MYB TF | Plum | Yes |
| | | | Plum | (Prunus americana) | |
| 878; 885 | Glyma02g16670 | GmMYBA2 | R2R3-MYB TF | Soybean | Yes |
| | | | Soybean | (Glycine max) | |
| 879; 886 | Glyma09g36983 | GmTT8a | bHLH TF | Soybean | Yes |
| | | | Soybean | (Glycine max) | |

[0863] The R2R3 MYB transcription factor can function alone or together with basic helix-loop-helix (bTILH) transcription factor to control anthocyanin accumulation by turning on the transcription of the majority of the genes involved in anthocyanin biosynthesis. Overexpression of MYB TFs can overwrite the pigmentation pathway in yellow-coated soybean cultivars and lead to anthocyanin accumulation.

[0864] Anthocyanins were successfully accumulated in the seed coat of soybeans, FIG. 37A. Once genetically stabilized, these lines were crossed with dairy expression lines (or re-transformed with dairy-expressing lines), with any of the dairy lines described herein. Results of stable pigmented seeds, are shown in FIG. 37B for the Myb factors.

Strategy 2: Chalcone synthase expression for soy lines that have dominant WI or T allele

[0865] Yellow-coated soybean cultivars contain dominant I or II alleles, which inhibit the production and accumulation of pigments via post transcriptional gene silencing (PTGS) of chalcone synthase (CHS) genes (Senda, M., et al., Suppressive mechanism of seed coat pigmentation in yellow soybean. Breed. Sci. 61, 523-530 (2011)). This silencing effect blocks an essential upstream step in the anthocyanin biosynthesis (FIG. 35). For soybean cultivars containing intact downstream biosynthesis genes (dominant W1 or T allele), the silencing effect by the I allele that prevents pigmentation, can be overcome by expressing a codon-optimized version of the CHS gene. Functionally conserved CHS from other plant species might as well be more efficient to overcome the PTGS.

[0866] Three codon optimization versions were created for the most abundantly expressed chalcone synthase gene in soybean, CHS7, see Table 67. In addition, a chalcone synthase from Arabidopsis and Horsetail were also selected to create codon optimized versions and to be expressed behind the testa specific promoters of Table 65.

TABLE 67
Codon optimized chalcone synthase genes

| Nucleic Acid | | | | | |
|---|---|---|---|---|---|
| SEQ ID; and | | | | | |
| Amino Acid | | | | | Chosen |
| SEQ ID, | | | | | for |
| respectively | Gene ID | Gene Name | Description | Species | soybean |
| 887; 896 | Glyma01g43880 | GmCHS7.1 | Codon optimized | Soybean | Yes |
| | | | soybean chalcone | (Glycine max) | |
| | | | synthase 7, version 1 | | |
| 888; 897 | Glyma01g43880 | GmCHS7.2 | Codon optimized | Soybean | No |
| | | | soybean chalcone | (Glycine max) | |
| | | | synthase 7, version 2 | | |
| 889; 898 | Glyma01g43880 | GmCHS7.3 | Codon optimized | Soybean | No |
| | | | soybean chalcone | (Glycine max) | |
| | | | synthase 7, version 3 | | |
| 890; 899 | AT5G13930 | AtCHS.1 | Codon optimized | Arabidopsis | No |
| | | | Arabidopsis chalcone | thaliana | |
| | | | synthase, version 1 | | |
| 891; 900 | AT5G13930 | AtCHS.2 | Codon optimized | Arabidopsis | Yes |
| | | | Arabidopsis chalcone | thaliana | |
| | | | synthase, version 2 | | |
| 892; 901 | AT5G13930 | AtCHS.3 | Codon optimized | Arabidopsis | No |
| | | | Arabidopsis chalcone | thaliana | |
| | | | synthase, version 3 | | |
| 893; 902 | AB030004 | EaCHS.1 | Codon optimized | Horsetail | No |
| | | | horsetail chalcone | (Equisetum | |
| | | | synthase, version 1 | arvense) | |
| 894; 903 | AB030004 | EaCHS.2 | Codon optimized | Horsetail | Yes |
| | | | horsetail chalcone | (Equisetum | |
| | | | synthase, version 2 | arvense) | |
| 895; 904 | AB030004 | EaCHS.3 | Codon optimized | Horsetail | Yes |
| | | | horsetail chalcone | (Equisetum | |
| | | | synthase, version 3 | arvense) | |

[0867] Images of the phenotypes of harvested seeds generated using strategy 2 for the chalcone synthase are shown in FIG. 37C. The representative images show chalcone synthase expression for soy lines that have dominant W1 or T allele.

Strategy 3: Combination of strategy 1 and 2

[0868] Also possible is a combination of strategy 1 and 2 to enhance the promotion of the whole anthocyanin biosynthesis pathway with MYB TF, cofactor bHLH, and codon optimized CHS. While MYB TF is able to function alone, co-expression with its cofactor bHLH TF can further enhance the MYB TF activity (Gao, R., et al., (2021). MYB transcription factors GmMYBA2 and GmMYBR function in a feedback loop to control pigmentation of seed coat in soybean. Journal of Experimental Botany, 72(12), 4401-4418; Lu, N., et al., (2021). Dissecting the transcriptional regulation of proanthocyanidin and anthocyanin biosynthesis in soybean (Glycine max). Plant Biotechnology Journal, 19(7), 1429-1442). The system will be more efficient if the promoters used can be activated by the MYB TF to create a feed-forward feedback loop.

### Example 24. Use of Amino Acid Rebalancing Platform for Enhanced Tissue Specific Expression of Proteins of Interest in Transgenic Plants

[0869] To increase the yield of recombinant protein of interest, such as milk proteins, egg proteins, meat proteins, and mammalian cell growth factors, in seeds of transgenic plants, a replacement strategy to rebalance amino acid composition in the seeds was employed where native seed-storage proteins were targeted for knock-out with gene-editing technology described herein, see FIG. 39A-FIG. 39D.

[0870] Target genes to be knocked out by a gene editing technology were selected based on a predicted demand on amino acid composition of the seed proteome. The amino acid compositions fluctuated by the missing of the endogenous target gene(s) can be compensated by expression of heterologous proteins of interest, which can rebalance amino acid compositions of the seed proteome. Using κ-casein protein as an example, the target genes for seed proteome rebalancing was determined by the following steps and also depicted in FIG. 39C-FIG. 39D:

[0871] 1. Calculate a % amino acid composition of the protein of interest and identify what the highest amino acid demands in the protein of interest for amino acid rebalancing (in this example of κ-casein, Proline (11.8%) is the highest amino acid demand as shown in Table 1).

[0872] 2. Calculate the endogenous amino acid balance/composition of the plant seed or using the endogenous amino acid balance/composition if a reference amino acid balance/composition of the plant seed is publicly available. For example, amino acid composition of Soybeans (Glycine max) is known in Kovalenko et al., (2006), Journal of Agricultural and Food Chemistry, 54(10), pp. 3485-3491, which is incorporated by reference in its entirety.

[0873] 3. Check where the biggest bottlenecks are and identify an amino acid rebalancing target profile by calculating the % difference (Δ %) of amino acids between the protein of interest and the endogenous amino acid balance provided by the soybean seed in order to figure out the most required amino acid(s).

[0874] 4. Select an endogenous target gene for knock-out, which are capable of enhancing expression of protein of interest with the highest demand of the selected amino acid for amino acid rebalancing. Exemplary cassettes targeting various genes are provided in Table 76 below. Proline is the selected amino acid for rebalancing amino acid in this example. Tables 68 and 69 are provided to present percentage of amino acid compositions of gene models encoding seed storage proteins.

[0875] Using κ-casein protein for example, it was determined that the amino acid, Proline, showed the highest difference in the amino acid compositions between κ-casein and soybean seeds. The most prominent seed storage proteins based on RNAseq (Gunadi et al. 2016 Plant Cell, Tissue and Organ Culture (PCTOC), 127(1), pp. 145-160) are listed in Tables 68 and 69.

[0876] The predicted bottlenecking amino acid is proline as described above. In one example, Glycinin 4 and Glycinin 5 are the two members of the group-2 subunit of Glycinin which is hexamers (11S). As Glycinin 4 and Glycinin 5 are paralogs with 79.65% identity in CDS. These genes encoding both proteins can be chosen for knock-out because (1) their protein sequences are the two most proline rich and (2) their sequence similarity facilitates multiplex gene-editing where individual editing targets could impact both gene models.

[0877] Out of the most prominent seed storage proteins, the proteins coded by Glyma.13G123500 (Glycinin 5), and Glyma.10G037100 (Glycinin 4), have the highest percentage in amino acid composition, at 7.16% for Proline and 6.75% for Proline, respectively, as presented in Table 68. Once genetic deficiencies of these two genes are imposed by gene-editing techniques (e.g. CRISPR/Cas systems), the transgenic seeds have more free amino acid pool for Proline, which allows for enhanced expression of foreign protein of interest possessing high Proline composition, and therefore accumulation of the foreign protein increases for amino acid rebalancing.

TABLE 68
Reference Amino Acid (AA) Percentage in
Soybean Seed and Protein of Interest

| | Total Soybean Seed* | | κ-Casein | | |
|---|---|---|---|---|---|
| AA | Mean % | Relative | No. | Relative | |
| Composition | Dry Basis | 20 AA % | of AA | 20 AA % | Δ %** |
| Ala | 1.79% | 3.61% | 14 | 8.30% | −4.69% |
| Arg | 3.17% | 6.40% | 5 | 3.00% | 3.40% |
| Asn | — | 7.20†% | 8 | 4.70% | 2.50% |
| Asp | 4.79% | 9.66% | 4 | 2.40% | 7.26% |
| Cys | 0.7% | 1.41% | 2 | 1.20% | 0.21% |
| Gln | — | 9.35†% | 15 | 8.90% | 0.45% |
| Glu | 7.66% | 15.45% | 12 | 7.10% | 8.35% |
| Gly | 1.77% | 3.57% | 2 | 1.20% | 2.37% |
| His | 1.15% | 2.32% | 3 | 1.80% | 0.52% |
| Ile | 1.94% | 3.91% | 12 | 7.10% | −3.19% |
| Leu | 3.26% | 6.58% | 8 | 4.70% | 1.88% |
| Lys | 2.69% | 5.43% | 9 | 5.30% | 0.13% |
| Met | 0.61% | 1.23% | 2 | 1.20% | 0.03% |
| Phe | 2.16% | 4.36% | 4 | 2.40% | 1.96% |
| Pro | 2.04% | 4.12% | 20 | 11.80% | −7.68% |
| Ser | 1.92% | 3.87% | 13 | 7.70% | −3.83% |
| Thr | 1.62% | 3.27% | 15 | 8.90% | −5.63% |
| Trp | 0.5% | 1.01% | 1 | 0.60% | 0.41% |
| Tyr | 1.53% | 3.09% | 9 | 5.30% | −2.21% |
| Val | 2.06% | 4.16% | 11 | 6.50% | −2.34% |
| Total | 43.16% | 100.00% | 169 | 100.00% | |

*Kovalenko, I. V., Rippke, G. R. and Hurburgh, C. R., 2006. Journal of Agricultural and Food Chemistry, 54(10), pp. 3485-3491.
†Utsumi, S., Matsumura, Y. & Mori, T. (1997) in Food Proteins and Their Applications, eds. Damodaran, S. & Paraf, A. (Dekker, New York), pp. 257-291.
**Percent (%) Difference = Relative Amino Acid (%) of total Soybean Seed − Relative Amino Acid (%) of κ-casein of interest.

TABLE 69
Percent of amino acid compositions of gene models encoding seed storage proteins.

| | Target Protein | | | | | |
|---|---|---|---|---|---|---|
| | β- | β- | β- | | | |
| | conglycinin | conglycinin | conglycinin | Cysteine | | |
| | α | α′ | β | Protease | Glycinin 1 | Glycinin 2 |
| | Gene ID (Glyma2.0) | | | | | |
| | Glyma.20G148400, | | Glyma.20g146200, | | | |
| | Glyma.20g148300 | Glyma.10G246300 | Glyma.20g148200 | Glyma.08G116300 | Glyma.03G163500 | LOC547900 |
| | AA Composition | | | | | |
| | Relative | Relative | Relative | Relative | Relative | Relative |
| | 20 AA % | 20 AA % | 20 AA % | 20 AA % | 20 AA % | 20 AA % |
| Ala | 4.63 | 4.35 | 5.24 | 6.07 | 5.86 | 6.80 |
| Arg | 7.93 | 6.60 | 7.06 | 3.43 | 5.45 | 5.98 |
| Asn | 6.78 | 6.28 | 7.52 | 4.22 | 7.47 | 8.25 |
| Asp | 4.63 | 4.35 | 4.78 | 6.07 | 3.43 | 3.71 |
| Cys | 0.83 | 0.81 | 0.23 | 1.85 | 2.22 | 2.06 |
| Gln | 7.93 | 8.53 | 7.52 | 4.22 | 9.70 | 10.52 |
| Glu | 13.06 | 13.04 | 8.43 | 7.39 | 8.28 | 7.63 |
| Gly | 4.30 | 4.83 | 4.33 | 8.18 | 7.27 | 7.22 |
| His | 1.32 | 3.54 | 1.82 | 3.69 | 1.62 | 0.82 |
| Ile | 5.12 | 4.51 | 5.92 | 5.54 | 5.25 | 4.74 |
| Leu | 8.93 | 7.73 | 10.48 | 8.18 | 7.47 | 7.84 |
| Lys | 5.95 | 6.92 | 4.78 | 6.86 | 5.05 | 3.92 |
| Met | 0.50 | 0.64 | 0.46 | 1.58 | 1.41 | 1.65 |
| Phe | 4.96 | 4.83 | 6.83 | 3.43 | 4.85 | 4.54 |
| Pro | 6.61 | 5.64 | 5.24 | 2.64 | 5.86 | 5.36 |
| Ser | 7.44 | 7.57 | 7.74 | 9.50 | 6.87 | 6.60 |
| Thr | 1.82 | 1.93 | 2.51 | 4.75 | 4.04 | 3.71 |
| Trp | 0.33 | 0.48 | 0.00 | 2.64 | 0.81 | 0.82 |
| Tyr | 2.48 | 2.42 | 2.73 | 4.75 | 2.22 | 2.27 |
| Val | 4.46 | 4.99 | 6.38 | 5.01 | 4.85 | 5.57 |
| Total | 100.00% | 100.00% | 100.00% | 100.00% | 100.00% | 100.00% |

TABLE 70
Percent of amino acid compositions of gene models encoding seed storage proteins.

| | Target Protein | | | |
|---|---|---|---|---|
| | Glycinin | Glycinin | Glycinin | Glycinin |
| | 3 | 4 | 5 | 7 |
| | Gene ID | | | |
| | Glyma.19G164900 | Glyma.10G037100 | Glyma.13G123500 | Glyma.19G164800 |
| | AA Composition | | | |
| | Relative | Relative | Relative | Relative |
| | 20 AA % | 20 AA % | 20 AA % | 20 AA % |
| Ala | 6.24 | 4.26 | 4.09 | 5.60 |
| Arg | 6.03 | 6.39 | 6.13 | 6.34 |
| Asn | 7.48 | 5.68 | 5.93 | 5.22 |
| Asp | 3.33 | 5.68 | 4.70 | 2.61 |
| Cys | 2.29 | 1.42 | 1.64 | 2.43 |
| Gln | 10.19 | 9.06 | 8.79 | 4.48 |
| Glu | 7.90 | 9.77 | 8.79 | 10.82 |
| Gly | 6.65 | 6.75 | 7.57 | 8.40 |
| His | 1.25 | 2.66 | 3.27 | 4.48 |
| Ile | 4.99 | 3.73 | 3.68 | 5.22 |
| Leu | 7.48 | 7.99 | 7.57 | 7.46 |
| Lys | 3.95 | 4.80 | 3.68 | 5.97 |
| Met | 1.25 | 0.53 | 0.82 | 1.31 |
| Phe | 6.03 | 2.84 | 3.89 | 3.54 |
| Pro | 6.03 | 6.75 | 7.16 | 5.22 |
| Ser | 7.07 | 8.17 | 7.98 | 5.22 |
| Thr | 3.74 | 3.55 | 4.09 | 3.92 |
| Trp | 0.62 | 1.07 | 0.82 | 1.12 |
| Tyr | 2.08 | 2.66 | 2.86 | 2.61 |
| Val | 5.41 | 6.22 | 6.54 | 8.02 |
| Total | 100.00 | 100.00 | 100.00 | 100.00 |

| | Target Protein | | |
|---|---|---|---|
| | Kunitz- | Kunitz- | |
| | type | type | |
| | Trypsin | Trypsin | |
| | inhibitor | inhibitor | Lectin |
| | Gene ID | | |
| | Glyma.01G095000 | Glyma.08G341500 | Glyma.02G012600 |
| | AA Composition | | |
| | Relative | Relative | Relative |
| | 20 AA % | 20 AA % | 20 AA % |
| Ala | 6.90 | 5.99 | 8.07 |
| Arg | 3.94 | 4.61 | 2.11 |
| Asn | 2.96 | 4.61 | 6.32 |
| Asp | 6.90 | 7.83 | 5.96 |
| Cys | 2.46 | 2.30 | 0.00 |
| Gln | 4.43 | 2.30 | 2.46 |
| Glu | 5.42 | 6.45 | 3.16 |
| Gly | 7.88 | 7.83 | 4.56 |
| His | 0.49 | 1.38 | 2.11 |
| Ile | 6.90 | 7.37 | 5.26 |
| Leu | 9.36 | 8.76 | 11.23 |
| Lys | 5.42 | 5.99 | 5.26 |
| Met | 1.97 | 1.38 | 0.70 |
| Phe | 6.40 | 6.45 | 4.91 |
| Pro | 4.93 | 5.07 | 5.61 |
| Ser | 5.91 | 7.37 | 12.28 |
| Thr | 5.91 | 4.61 | 8.07 |
| Trp | 0.99 | 0.92 | 2.11 |
| Tyr | 2.96 | 2.30 | 1.75 |
| Val | 7.88 | 6.45 | 8.07 |
| Total | 100.00 | 100.00 | 100.00 |

[0878] In another example, this amino acid rebalancing platform strategy enables a user to fine-tune the selection of a gene to be knocked out, thereby reducing or eliminating a protein, and provides a tailored approach for the proteins of interest to be expressed. An amino acid rebalancing strategy can be applied for selection of genes to be genomically disrupted to reduce or knock out an endogenous seed protein.

[0879] Table 70 displays the percent value of each amino acid that constitutes the seed storage proteins for most expressed seed storage proteins. The percent expressed protein value was estimated by LC-MS-MS from a mature seed aqueous extract. Protein expression in seeds provided in Table 70 are taken into consideration and the six top expression seed storage proteins are presented in Table 70, which are β-conglycinin α, β-conglycinin α′, β-conglycinin β, Glycinin 1, Glycinin 4, and Kunitz-Trypsin inhibitor.

[0880] Tables 71 to Table 74 demonstrates the estimating of the percent amount of amino acid if a protein of interest is expressed at 10% in the seed. As presented in Tables 71-74, the delta difference (A %) of the estimated percentage of amino acid to each of the most abundant seed proteins from Tables 69-70 are calculated. This approach is independent of the recombinant protein that needs to be expressed, but is based on a seed amino acid rebalancing strategy. Examples are shown for the following proteins: κ-Casein (Table 72), Ovalbumin (Table 73), Vitellogenin-2 (Table 74) and a chicken fibroblast growth factor (Table 75).

[0881] A positive value (no highlight) means that if that particular seed protein is knocked out, it would release enough amino acid to buffer the production of the protein of interest expressed at 10 percent.

[0882] A negative value (highlighted in yellow) means that knocking out that specific protein will not release enough amino acids and more than one protein should be knocked out.

[0883] Two Exemplary Calculations of Amino Acid Difference are provided below;

[0884] 1. Expression of κ-Casein at 10% in the seeds (Table 71).
[0885] (i) screening the protein profiles presented in Table 71 and identifying the protein the most likely to release the amino acids to enable the synthesis of κ-Casein, which would be Glycinin 1 with most of amino acids having the positive value other than proline, Threonine, and Tyrosine.
[0886] (ii) checking a negative delta amino acid presented in Table 71 for Glycinin, which is −0.16% of proline, −0.18% of Threonine and −0.14% of Tyrosine.
[0887] (iii) Other than glycinin 1 selected for the amino acid rebalancing from step (i), the protein with the closest matching profile to release enough of proline, threonine and tyrosine is either Kunitz-Trypsin (Glyma.08G341500), the β-conglycinin α, β-conglycinin α′, β-conglycinin R or Glycinin 4. Thus, knocking out one of them is sufficient along with Glycinin 1 knock-out.
[0888] (iv) Based on step (iii), the target protein for knocking out would be β-conglycinin proteins, but avoiding knocking out a homologous protein to glycinin 1.

[0889] 2. Expression of Vitollegenin2 at 10% in the seeds (Table 73).
[0890] (i) screening the protein profiles presented in Table 73 and identifying the protein the most likely to release the amino acids to enable the synthesis of Vitollegenin2 is β-conglycinin α′ with most of amino acids having the positive value except for Ser.
[0891] (ii) checking a negative delta amino acid presented in Table 73 for Vitollegenin2, which is serine at 4.26%.
[0892] (iii) In this particular case, serine is in significant negative difference and a combination of protein will have to be knocked out in order to release enough serine. In Table 73, excluding β-conglycinin α′, proteins to consider for knocking out are a combination of 3-conglycinin α, β-conglycinin β, Glycinin 1 and Glycinin 4.

[0893] Table 71 to Table 74 provide information on amino acid difference between the most abundant seed storage proteins and κ-Casein (Table 67), Ovalbumin (Table 73), Vitellogenin-2 (Table 74) and a chicken fibroblast growth factor (Table 75) when each protein is expressed at 10% in soybean seeds. Using the amino acid difference information in Tables 71-74, one or more seed storage proteins-encoding genes can be selected to be knocked out for the genetic alteration, which can result in changes in the proteomes as the seed rebalances its protein content. As seeds possess intrinsic compositional plasticity resulting from the alteration of the source-sink relationship; this can be replenished by the accumulation of foreign proteins as an alternative sink protein.

[0894] The amino acid rebalancing platform can be used for the exchange of intrinsic protein loss for enhanced expression of foreign proteins that can minimize unpredictable collateral changes in the proteome but maximize predictable collateral proteome rebalancing by the method taught in the above examples.

[0895] The amino acid rebalancing platform is applicable for any of foreign proteins including, but not limited to as milk proteins, egg proteins, meat proteins, and mammalian cell growth factors as taught in the present disclosure.

TABLE 71
Percent representation of each amino acids in the most expressed storage seed protein

| | β- | β- | β- | | | | |
|---|---|---|---|---|---|---|---|
| | conglycinin | conglycinin | conglycinin | Cystein | | | |
| | α | α′ | β | Protease | Glycinin 1 | Glycinin 2 | Glycinin 3 |
| | Glyma2.0 | | | | | | |
| | Glyma.20G148400, | | Glyma.20g146200, | | | | |
| | Glyma.20g148300 | Glyma.10G246300 | Glyma.20g148200 | Glyma.08G116300 | Glyma.03G163500 | LOC547900 | Glyma.19G164900 |
| | % protein expression | | | | | | |
| | 12.3% | 18.20% | 17.61% | 0.09% | 17.33% | 1.70% | 1.10% |
| Ala | 0.57% | 0.79% | 0.92% | 0.01% | 1.02% | 0.12% | 0.07% |
| Arg | 0.98% | 1.20% | 1.24% | 0.00% | 0.95% | 0.10% | 0.07% |
| Asn | 0.84% | 1.14% | 1.32% | 0.00% | 1.30% | 0.14% | 0.08% |
| Asp | 0.57% | 0.79% | 0.84% | 0.01% | 0.60% | 0.06% | 0.04% |
| Cys | 0.10% | 0.15% | 0.04% | 0.00% | 0.39% | 0.04% | 0.03% |
| Gln | 0.98% | 1.55% | 1.32% | 0.00% | 1.68% | 0.18% | 0.11% |
| Glu | 1.61% | 2.37% | 1.48% | 0.01% | 1.44% | 0.13% | 0.09% |
| Gly | 0.53% | 0.88% | 0.76% | 0.01% | 1.26% | 0.12% | 0.07% |
| His | 0.16% | 0.64% | 0.32% | 0.00% | 0.28% | 0.01% | 0.01% |
| Ile | 0.63% | 0.82% | 1.04% | 0.00% | 0.91% | 0.08% | 0.05% |
| Leu | 1.10% | 1.41% | 1.85% | 0.01% | 1.30% | 0.13% | 0.08% |
| Lys | 0.73% | 1.26% | 0.84% | 0.01% | 0.88% | 0.07% | 0.04% |
| Met | 0.06% | 0.12% | 0.08% | 0.00% | 0.25% | 0.03% | 0.01% |
| Phe | 0.61% | 0.88% | 1.20% | 0.00% | 0.84% | 0.08% | 0.07% |
| Pro | 0.82% | 1.03% | 0.92% | 0.00% | 1.02% | 0.09% | 0.07% |
| Ser | 0.92% | 1.38% | 1.36% | 0.01% | 1.19% | 0.11% | 0.08% |
| Thr | 0.22% | 0.35% | 0.44% | 0.00% | 0.70% | 0.06% | 0.04% |
| Trp | 0.04% | 0.09% | 0.00% | 0.00% | 0.14% | 0.01% | 0.01% |
| Tyr | 0.31% | 0.44% | 0.48% | 0.00% | 0.39% | 0.04% | 0.02% |
| Val | 0.55% | 0.91% | 1.12% | 0.00% | 0.84% | 0.09% | 0.06% |

| | | | | Kunitz- | Kunitz- | |
|---|---|---|---|---|---|---|
| | Glycinin 4 | Glycinin 5 | Glycinin 7 | Trypsin | Trypsin | Lectin |
| | Glyma2.0 | | | | | |
| | Glyma.10G037100 | Glyma.13G123500 | Glyma.19G164800 | Glyma.01G095000 | Glyma.08G341500 | Glyma.02G012600 |
| | % protein expression | | | | | |
| | 12.66% | 2.35% | 0.00% | 1.73% | 14.39% | 0.82% |
| Ala | 0.54% | 0.10% | 0.00% | 0.12% | 0.86% | 0.07% |
| Arg | 0.81% | 0.14% | 0.00% | 0.07% | 0.66% | 0.02% |
| Asn | 0.72% | 0.14% | 0.00% | 0.05% | 0.66% | 0.05% |
| Asp | 0.72% | 0.11% | 0.00% | 0.12% | 1.13% | 0.05% |
| Cys | 0.18% | 0.04% | 0.00% | 0.04% | 0.33% | 0.00% |
| Gln | 1.15% | 0.21% | 0.00% | 0.08% | 0.33% | 0.02% |
| Glu | 1.24% | 0.21% | 0.00% | 0.09% | 0.93% | 0.03% |
| Gly | 0.85% | 0.18% | 0.00% | 0.14% | 1.13% | 0.04% |
| His | 0.34% | 0.08% | 0.00% | 0.01% | 0.20% | 0.02% |
| Ile | 0.47% | 0.09% | 0.00% | 0.12% | 1.06% | 0.04% |
| Leu | 1.01% | 0.18% | 0.00% | 0.16% | 1.26% | 0.09% |
| Lys | 0.61% | 0.09% | 0.00% | 0.09% | 0.86% | 0.04% |
| Met | 0.07% | 0.02% | 0.00% | 0.03% | 0.20% | 0.01% |
| Phe | 0.36% | 0.09% | 0.00% | 0.11% | 0.93% | 0.04% |
| Pro | 0.85% | 0.17% | 0.00% | 0.09% | 0.73% | 0.05% |
| Ser | 1.03% | 0.19% | 0.00% | 0.10% | 1.06% | 0.10% |
| Thr | 0.45% | 0.10% | 0.00% | 0.10% | 0.66% | 0.07% |
| Trp | 0.13% | 0.02% | 0.00% | 0.02% | 0.13% | 0.02% |
| Tyr | 0.34% | 0.07% | 0.00% | 0.05% | 0.33% | 0.01% |
| Val | 0.79% | 0.15% | 0.00% | 0.14% | 0.93% | 0.07% |

TABLE 72
Calculation of the amino acid difference between κ-Casein expressed at
10% and the most abundant seed storage proteins in Soybean (Δ%)

| | | | Δ%(Soy-KCN) | | | | | |
|---|---|---|---|---|---|---|---|---|
| | | | β- | β- | β- | | | |
| OKC1-T | | | conglycinin | conglycinin | conglycinin | Cystein | Glycinin | Glycinin |
| AA | % | 10.00% | α | α′ | β | Protease | 1 | 2 |
| Ala | 8.20% | 0.82% | −0.25% | −0.03% | 0.10% | −0.81% | 0.20% | −0.70% |
| Arg | 2.90% | 0.29% | 0.69% | 0.91% | 0.95% | −0.29% | 0.66% | −0.19% |
| Asn | 4.70% | 0.47% | 0.37% | 0.67% | 0.85% | −0.47% | 0.83% | −0.33% |
| Asp | 2.40% | 0.24% | 0.33% | 0.55% | 0.60% | −0.23% | 0.36% | −0.18% |
| Cys | 1.20% | 0.12% | −0.02% | 0.03% | −0.08% | −0.12% | 0.27% | −0.08% |
| Gln | 8.80% | 0.88% | 0.10% | 0.67% | 0.44% | −0.88% | 0.80% | −0.70% |
| Glu | 7.10% | 0.71% | 0.90% | 1.66% | 0.77% | −0.70% | 0.73% | −0.58% |
| Gly | 1.20% | 0.12% | 0.41% | 0.76% | 0.64% | −0.11% | 1.14% | 0.00% |
| His | 1.80% | 0.18% | −0.02% | 0.46% | 0.14% | −0.18% | 0.10% | −0.17% |
| Ile | 7.10% | 0.71% | −0.08% | 0.11% | 0.33% | −0.71% | 0.20% | −0.63% |
| Leu | 4.70% | 0.47% | 0.63% | 0.94% | 1.38% | −0.46% | 0.83% | −0.34% |
| Lys | 5.30% | 0.53% | 0.20% | 0.73% | 0.31% | −0.52% | 0.35% | −0.46% |
| Met | 1.80% | 0.18% | −0.12% | −0.06% | −0.10% | −0.18% | 0.07% | −0.15% |
| Phe | 2.40% | 0.24% | 0.37% | 0.64% | 0.96% | −0.24% | 0.60% | −0.16% |
| Pro | 11.80% | 1.18% | −0.36% | −0.15% | −0.26% | −1.18% | −0.16% | −1.09% |
| Ser | 7.60% | 0.76% | 0.16% | 0.62% | 0.60% | −0.75% | 0.43% | −0.65% |
| Thr | 8.80% | 0.88% | −0.66% | −0.53% | −0.44% | −0.88% | −0.18% | −0.82% |
| Trp | 0.60% | 0.06% | −0.02% | 0.03% | −0.06% | −0.06% | 0.08% | −0.05% |
| Tyr | 5.30% | 0.53% | −0.22% | −0.09% | −0.05% | −0.53% | −0.14% | −0.49% |
| Val | 6.50% | 0.65% | −0.10% | 0.26% | 0.47% | −0.65% | 0.19% | −0.56% |

| | Δ%(Soy-KCN) | | | | | |
|---|---|---|---|---|---|---|
| OKC1-T | Glycinin | Glycinin | Glycinin | Glycinin | Kunitz- | |
| AA | 3 | 4 | 5 | 7 | Trypsin | Lectin |
| Ala | −0.75% | −0.28% | −0.72% | −0.82% | −0.70% | 0.04% |
| Arg | −0.22% | 0.52% | −0.15% | −0.29% | −0.22% | 0.37% |
| Asn | −0.39% | 0.25% | −0.33% | −0.47% | −0.42% | 0.19% |
| Asp | −0.20% | 0.48% | −0.13% | −0.24% | −0.12% | 0.89% |
| Cys | −0.09% | 0.06% | −0.08% | −0.12% | −0.08% | 0.21% |
| Gln | −0.77% | 0.27% | −0.67% | −0.88% | −0.80% | −0.55% |
| Glu | −0.62% | 0.53% | −0.50% | −0.71% | −0.62% | 0.22% |
| Gly | −0.05% | 0.73% | 0.06% | −0.12% | 0.02% | 1.01% |
| His | −0.17% | 0.16% | −0.10% | −0.18% | −0.17% | 0.02% |
| Ile | −0.66% | −0.24% | −0.62% | −0.71% | −0.59% | 0.35% |
| Leu | −0.39% | 0.54% | −0.29% | −0.47% | −0.31% | 0.79% |
| Lys | −0.49% | 0.08% | −0.44% | −0.53% | −0.44% | 0.33% |
| Met | −0.17% | −0.11% | −0.16% | −0.18% | −0.15% | 0.02% |
| Phe | −0.17% | 0.12% | −0.15% | −0.24% | −0.13% | 0.69% |
| Pro | −1.11% | −0.33% | −1.01% | −1.18% | −1.09% | −0.45% |
| Ser | −0.68% | 0.27% | −0.57% | −0.76% | −0.66% | 0.30% |
| Thr | −0.84% | −0.43% | −0.78% | −0.88% | −0.78% | −0.22% |
| Trp | −0.05% | 0.07% | −0.04% | −0.06% | −0.04% | 0.07% |
| Tyr | −0.51% | −0.19% | −0.46% | −0.53% | −0.48% | −0.20% |
| Val | −0.59% | 0.14% | −0.50% | −0.65% | −0.51% | 0.28% |

TABLE 73
Calculation of the amino acid difference between egg Ovalbumin expressed
at 10% and the most abundant seed storage proteins in Soybean (Δ%)

| | | | Δ%(Soy-Ovalbumin) | | | | | |
|---|---|---|---|---|---|---|---|---|
| | | | β- | β- | | | | |
| Ovalbumin | | | conglycinin | conglycinin | β- | Cysteine | Glycinin | Glycinin |
| AA | % | 10.00% | α | α′ | conglycinin | Protease | 1 | 2 |
| Ala | 9.10% | 0.91% | −0.34% | −0.12% | 0.01% | −0.90% | 0.11% | −0.79% |
| Arg | 3.90% | 0.39% | 0.59% | 0.81% | 0.85% | −0.39% | 0.56% | −0.29% |
| Asn | 4.40% | 0.44% | 0.40% | 0.70% | 0.88% | −0.44% | 0.86% | −0.30% |
| Asp | 3.60% | 0.36% | 0.21% | 0.43% | 0.48% | −0.35% | 0.24% | −0.30% |
| Cys | 1.60% | 0.16% | −0.06% | −0.01% | −0.12% | −0.16% | 0.23% | −0.12% |
| Gln | 3.90% | 0.39% | 0.59% | 1.16% | 0.93% | −0.39% | 1.29% | −0.21% |
| Glu | 8.50% | 0.85% | 0.76% | 1.52% | 0.63% | −0.84% | 0.59% | −0.72% |
| Gly | 4.90% | 0.49% | 0.04% | 0.39% | 0.27% | −0.48% | 0.77% | −0.37% |
| His | 1.80% | 0.18% | −0.02% | 0.46% | 0.14% | −0.18% | 0.10% | −0.17% |
| Ile | 6.50% | 0.65% | −0.02% | 0.17% | 0.39% | −0.65% | 0.26% | −0.57% |
| Leu | 8.30% | 0.83% | 0.27% | 0.58% | 1.02% | −0.82% | 0.47% | −0.70% |
| Lys | 5.20% | 0.52% | 0.21% | 0.74% | 0.32% | −0.51% | 0.36% | −0.45% |
| Met | 4.40% | 0.44% | −0.38% | −0.32% | −0.36% | −0.44% | −0.19% | −0.41% |
| Phe | 5.20% | 0.52% | 0.09% | 0.36% | 0.68% | −0.52% | 0.32% | −0.44% |
| Pro | 3.60% | 0.36% | 0.46% | 0.67% | 0.56% | −0.36% | 0.66% | −0.27% |
| Ser | 9.80% | 0.98% | −0.06% | 0.40% | 0.38% | −0.97% | 0.21% | −0.87% |
| Thr | 3.90% | 0.39% | −0.17% | −0.04% | 0.05% | −0.39% | 0.31% | −0.33% |
| Trp | 0.80% | 0.08% | −0.04% | 0.01% | −0.08% | −0.08% | 0.06% | −0.07% |
| Tyr | 2.60% | 0.26% | 0.05% | 0.18% | 0.22% | −0.26% | 0.13% | −0.22% |
| Val | 8.00% | 0.80% | −0.25% | 0.11% | 0.32% | −0.80% | 0.04% | −0.71% |

| | Δ%(Soy-Ovalbumin) | | | | | |
|---|---|---|---|---|---|---|
| Ovalbumin | Glycinin | Glycinin | Glycinin | Glycinin | Kunitz- | |
| AA | 3 | 4 | 5 | 7 | Trypsin | Lectin |
| Ala | −0.84% | −0.37% | −0.81% | −0.91% | −0.79% | −0.05% |
| Arg | −0.32% | 0.42% | −0.25% | −0.39% | −0.32% | 0.27% |
| Asn | −0.36% | 0.28% | −0.30% | −0.44% | −0.39% | 0.22% |
| Asp | −0.32% | 0.36% | −0.25% | −0.36% | −0.24% | 0.77% |
| Cys | −0.13% | 0.02% | −0.12% | −0.16% | −0.12% | 0.17% |
| Gln | −0.28% | 0.76% | −0.18% | −0.39% | −0.31% | −0.06% |
| Glu | −0.76% | 0.39% | −0.64% | −0.85% | −0.76% | 0.08% |
| Gly | −0.42% | 0.36% | −0.31% | −0.49% | −0.35% | 0.64% |
| His | −0.17% | 0.16% | −0.10% | −0.18% | −0.17% | 0.02% |
| Ile | −0.60% | −0.18% | −0.56% | −0.65% | −0.53% | 0.41% |
| Leu | −0.75% | 0.18% | −0.65% | −0.83% | −0.67% | 0.43% |
| Lys | −0.48% | 0.09% | −0.43% | −0.52% | −0.43% | 0.34% |
| Met | −0.43% | −0.37% | −0.42% | −0.44% | −0.41% | −0.24% |
| Phe | −0.45% | −0.16% | −0.43% | −0.52% | −0.41% | 0.41% |
| Pro | −0.29% | 0.49% | −0.19% | −0.36% | −0.27% | 0.37% |
| Ser | −0.90% | 0.05% | −0.79% | −0.98% | −0.88% | 0.08% |
| Thr | −0.35% | 0.06% | −0.29% | −0.39% | −0.29% | 0.27% |
| Trp | −0.07% | 0.05% | −0.06% | −0.08% | −0.06% | 0.05% |
| Tyr | −0.24% | 0.08% | −0.19% | −0.26% | −0.21% | 0.07% |
| Val | −0.74% | −0.01% | −0.65% | −0.80% | −0.66% | 0.13% |

TABLE 74
Calculation of the amino acid difference between egg vitellogenin-2 expressed
at 10% and the most abundant seed storage proteins in Soybean (Δ%)

| | | | Δ%(Soy-vitellogenin-2) | | | | | |
|---|---|---|---|---|---|---|---|---|
| | | | β- | β- | β- | | | |
| Vitellogenin-2 | | | conglycinin | conglycinin | conglycinin | Cystein | Glycinin | Glycinin |
| AA | % | 10.00% | α | α′ | β | Protease | 1 | 2 |
| Ala | 3.20% | 0.32% | 0.25% | 0.47% | 0.60% | −0.31% | 0.70% | −0.20% |
| Arg | 5.00% | 0.50% | 0.48% | 0.70% | 0.74% | −0.50% | 0.45% | −0.40% |
| Asn | 3.20% | 0.32% | 0.52% | 0.82% | 1.00% | −0.32% | 0.98% | −0.18% |
| Asp | 2.80% | 0.28% | 0.29% | 0.51% | 0.56% | −0.27% | 0.32% | −0.22% |
| Cys | 0.00% | 0.00% | 0.10% | 0.15% | 0.04% | 0.00% | 0.39% | 0.04% |
| Gln | 1.40% | 0.14% | 0.84% | 1.41% | 1.18% | −0.14% | 1.54% | 0.04% |
| Glu | 3.70% | 0.37% | 1.24% | 2.00% | 1.11% | −0.36% | 1.07% | −0.24% |
| Gly | 2.30% | 0.23% | 0.30% | 0.65% | 0.53% | −0.22% | 1.03% | −0.11% |
| His | 6.00% | 0.60% | −0.44% | 0.04% | −0.28% | −0.60% | −0.32% | −0.59% |
| Ile | 0.90% | 0.09% | 0.54% | 0.73% | 0.95% | −0.09% | 0.82% | −0.01% |
| Leu | 1.40% | 0.14% | 0.96% | 1.27% | 1.71% | −0.13% | 1.16% | −0.01% |
| Lys | 6.90% | 0.69% | 0.04% | 0.57% | 0.15% | −0.68% | 0.19% | −0.62% |
| Met | 0.90% | 0.09% | −0.03% | 0.03% | −0.01% | −0.09% | 0.16% | −0.06% |
| Phe | 0.50% | 0.05% | 0.56% | 0.83% | 1.15% | −0.05% | 0.79% | 0.03% |
| Pro | 1.40% | 0.14% | 0.68% | 0.89% | 0.78% | −0.14% | 0.88% | −0.05% |
| Ser | 56.40% | 5.64% | −4.72% | −4.26% | −4.28% | −5.63% | −4.45% | −5.53% |
| Thr | 1.80% | 0.18% | 0.04% | 0.17% | 0.26% | −0.18% | 0.52% | −0.12% |
| Trp | 0.50% | 0.05% | −0.01% | 0.04% | 0.05% | −0.05% | 0.09% | −0.04% |
| Tyr | 0.50% | 0.05% | 0.26% | 0.39% | 0.43% | −0.05% | 0.34% | −0.01% |
| Val | 1.40% | 0.14% | 0.41% | 0.77% | 0.98% | −0.14% | 0.70% | −0.05% |

| | Δ%(Soy-vitellogenin-2) | | | | | |
|---|---|---|---|---|---|---|
| Vitellogenin-2 | Glycinin | Glycinin | Glycinin | Glycinin | Kunitz- | |
| AA | 3 | 4 | 5 | 7 | Trypsin | Lectin |
| Ala | −0.25% | 0.22% | −0.22% | −0.32% | −0.20% | 0.54% |
| Arg | −0.43% | 0.31% | −0.36% | −0.50% | −0.43% | 0.16% |
| Asn | −0.24% | 0.40% | −0.18% | −0.32% | −0.27% | 0.34% |
| Asp | −0.24% | 0.44% | −0.17% | −0.28% | −0.16% | 0.85% |
| Cys | 0.03% | 0.18% | 0.04% | 0.00% | 0.04% | 0.33% |
| Gln | −0.03% | 1.01% | 0.07% | −0.14% | −0.06% | 0.19% |
| Glu | −0.28% | 0.87% | −0.16% | −0.37% | −0.28% | 0.56% |
| Gly | −0.16% | 0.62% | −0.05% | −0.23% | −0.09% | 0.90% |
| His | −0.59% | −0.26% | −0.52% | −0.60% | −0.59% | −0.40% |
| Ile | −0.04% | 0.38% | 0.00% | −0.09% | 0.03% | 0.97% |
| Leu | −0.06% | 0.87% | 0.04% | −0.14% | 0.02% | 1.12% |
| Lys | −0.65% | −0.08% | −0.60% | −0.69% | −0.60% | 0.17% |
| Met | −0.08% | −0.02% | −0.07% | −0.09% | −0.06% | 0.11% |
| Phe | 0.02% | 0.31% | 0.04% | −0.05% | 0.06% | 0.88% |
| Pro | −0.07% | 0.71% | 0.03% | −0.14% | −0.05% | 0.59% |
| Ser | −5.56% | −4.61% | −5.45% | −5.64% | −5.54% | −4.58% |
| Thr | −0.14% | 0.27% | −0.08% | −0.18% | −0.08% | 0.48% |
| Trp | −0.04% | 0.08% | −0.03% | −0.05% | −0.03% | 0.08% |
| Tyr | −0.03% | 0.29% | 0.02% | −0.05% | 0.00% | 0.28% |
| Val | −0.08% | 0.65% | 0.01% | −0.14% | 0.00% | 0.79% |

TABLE 75
Calculation of the amino acid difference between a chicken fibroblast growth factor
in expressed at 10% and the most abundant seed storage proteins in Soybean (Δ%).

| | | | Δ%(Soy-Fibroblast growth factor) | | | | | |
|---|---|---|---|---|---|---|---|---|
| | | | β- | β- | β- | | | |
| Fibroblast growth factor | | | conglycinin | conglycinin | conglycinin | Cysteine | Glycinin | Glycinin |
| AA | % | 10.00% | α | α′ | β | Protease | 1 | 2 |
| Ala | 8.90% | 0.89% | −0.32% | −0.10% | 0.03% | −0.88% | 0.13% | −0.77% |
| Arg | 7.00% | 0.70% | 0.28% | 0.50% | 0.54% | −0.70% | 0.25% | −0.60% |
| Asn | 3.80% | 0.38% | 0.46% | 0.76% | 0.94% | −0.38% | 0.92% | −0.24% |
| Asp | 5.10% | 0.51% | 0.06% | 0.28% | 0.33% | −0.50% | 0.09% | −0.45% |
| Cys | 1.90% | 0.19% | −0.09% | −0.04% | −0.15% | −0.19% | 0.20% | −0.15% |
| Gln | 2.50% | 0.25% | 0.73% | 1.30% | 1.07% | −0.25% | 1.43% | −0.07% |
| Glu | 5.10% | 0.51% | 1.10% | 1.86% | 0.97% | −0.50% | 0.93% | −0.38% |
| Gly | 11.40% | 1.14% | −0.61% | −0.26% | −0.38% | −1.13% | 0.12% | −1.02% |
| His | 1.30% | 0.13% | 0.03% | 0.51% | 0.19% | −0.13% | 0.15% | −0.12% |
| Ile | 3.20% | 0.32% | 0.31% | 0.50% | 0.72% | −0.32% | 0.59% | −0.24% |
| Leu | 8.90% | 0.89% | 0.21% | 0.52% | 0.96% | −0.88% | 0.41% | −0.76% |
| Lys | 8.90% | 0.89% | −0.16% | 0.37% | −0.05% | −0.88% | −0.01% | −0.82% |
| Met | 1.90% | 0.19% | −0.13% | −0.07% | −0.11% | −0.19% | 0.06% | −0.16% |
| Phe | 5.70% | 0.57% | 0.04% | 0.31% | 0.63% | −0.57% | 0.27% | −0.49% |
| Pro | 7.00% | 0.70% | 0.12% | 0.33% | 0.22% | −0.70% | 0.32% | −0.61% |
| Ser | 5.70% | 0.57% | 0.35% | 0.81% | 0.79% | −0.56% | 0.62% | −0.46% |
| Thr | 3.80% | 0.38% | −0.16% | −0.03% | 0.06% | −0.38% | 0.32% | −0.32% |
| Trp | 0.60% | 0.06% | −0.02% | 0.03% | −0.06% | −0.06% | 0.08% | −0.05% |
| Tyr | 3.80% | 0.38% | −0.07% | 0.06% | 0.10% | −0.38% | 0.01% | −0.34% |
| Val | 3.80% | 0.38% | 0.17% | 0.53% | 0.74% | −0.38% | 0.46% | −0.29% |

| | Δ%(Soy-Fibroblast growth factor) | | | | | |
|---|---|---|---|---|---|---|
| Fibroblast growth factor | Glycinin | Glycinin | Glycinin | Glycinin | Kunitz- | |
| AA | 3 | 4 | 5 | 7 | Trypsin | Lectin |
| Ala | −0.82% | −0.35% | −0.79% | −0.89% | −0.77% | −0.03% |
| Arg | −0.63% | 0.11% | −0.56% | −0.70% | −0.63% | −0.04% |
| Asn | −0.30% | 0.34% | −0.24% | −0.38% | −0.33% | 0.28% |
| Asp | −0.47% | 0.21% | −0.40% | −0.51% | −0.39% | 0.62% |
| Cys | −0.16% | −0.01% | −0.15% | −0.19% | −0.15% | 0.14% |
| Gln | −0.14% | 0.90% | −0.04% | −0.25% | −0.17% | 0.08% |
| Glu | −0.42% | 0.73% | −0.30% | −0.51% | −0.42% | 0.42% |
| Gly | −1.07% | −0.29% | −0.96% | −1.14% | −1.00% | −0.01% |
| His | −0.12% | 0.21% | −0.05% | −0.13% | −0.12% | 0.07% |
| Ile | −0.27% | 0.15% | −0.23% | −0.32% | −0.20% | 0.74% |
| Leu | −0.81% | 0.12% | −0.71% | −0.89% | −0.73% | 0.37% |
| Lys | −0.85% | −0.28% | −0.80% | −0.89% | −0.80% | −0.03% |
| Met | −0.18% | −0.12% | −0.17% | −0.19% | −0.16% | 0.01% |
| Phe | −0.50% | −0.21% | −0.48% | −0.57% | −0.46% | 0.36% |
| Pro | −0.63% | 0.15% | −0.53% | −0.70% | −0.61% | 0.03% |
| Ser | −0.49% | 0.46% | −0.38% | −0.57% | −0.47% | 0.49% |
| Thr | −0.34% | 0.07% | −0.28% | −0.38% | −0.28% | 0.28% |
| Trp | −0.05% | 0.07% | −0.04% | −0.06% | −0.04% | 0.07% |
| Tyr | −0.36% | −0.04% | −0.31% | −0.38% | −0.33% | −0.05% |
| Val | −0.32% | 0.41% | −0.23% | −0.38% | −0.24% | 0.55% |

TABLE 76
Exemplary Cassettes Encoding CRISPR Enzyme

| Construct | Cassette Detail | CRISPR Target | Target Protein |
|---|---|---|---|
| AR03-13 | Cas9(KO 6x Glycinin)(GmSeed5:sig5:OKC1- | 6 Glycinin gene | KCN |
| | T:nosT) | | |
| AR09-02 | Cas9(KO 4x BCon) | 4 Beta-Conglycinin | None |
| | | Genes | |
| AR14-38 | Cas9(KO 6x Glycinin)(GmSeed2:sig2:OBC- | 6 Glycinin gene | BC-BC-KCN-LG |
| | T3:OBC-T2:OKC1-T:OLG1:AtHSP | | |
| | T:AtUbi10T) | | |
| AR14-39 | Cas9(KO 6x Glycinin)(GmSeed2:sig2:OBC- | 6 Glycinin gene | BC-FM-aS1-FM- |
| | T4:FM:OaS1-T2:FM:OaS1-T:FM:OBC- | | aS1-FM-BC |
| | T2:AtHSP T:AtUbi10T) | | |
| AR14-40 | Cas9(KO 4x BCon)(GmSeed2:sig2:OBC- | 4 Beta-Conglycinin | BC-BC-KCN-LG |
| | T3:OBC-T2:OKC1-T:OLG1:AtHSP | Genes | |
| | T:AtUbi10T) | | |
| AR14-41 | Cas9(KO 4x BCon)(GmSeed2:sig2:OBC- | 4 Beta-Conglycinin | BC-FM-aS1-FM- |
| | T4:FM:OaS1-T2:FM:OaS1- | Genes | aS1-FM-BC |
| | T:FM:OBC-T2:AtHSP T:AtUbi10T) | | |
| AR14-42 | Cas9(KO KTI3)(GmSeed2:sig2:OBC- | Kunitz Tripsin | BC-BC-KCN-LG |
| | T3:OBC-T2:OKC1-T:OLG1:AtHSP | Inhibitor 3 | |
| | T:AtUbi10T) | | |
| AR14-43 | Cas9(KO KTI3)(GmSeed2:sig2:OBC- | Kunitz Tripsin | BC-FM-aS1-FM- |
| | T4:FM:OaS1-T2:FM:OaS1-T:FM:OBC- | Inhibitor 3 | aS1-FM-BC |
| | T2:AtHSP T:AtUbi10T) | | |
| AR14-44 | Cas9(KO 3x Lox)(GmSeed2:sig2:OBC- | 3 Lipoxygenase | BC-BC-KCN-LG |
| | T3:OBC-T2:OKC1-T:OLG1:AtHSP | genes | |
| | T:AtUbi10T) | | |
| AR14-45 | Cas9(KO 3x Lox)(GmSeed2:sig2:OBC- | 3 Lipoxygenase | BC-FM-aS1-FM- |
| | T4:FM:OaS1-T2:FM:OaS1-T:FM:OBC- | genes | aS1-FM-BC |
| | T2:AtHSP T:AtUbi10T) | | |

### Example 25: Post-Translational Modifications as a Shielding Mechanisms for Degradation

[0896] Co-expression with a kinase: phosphorylation

[0897] The enzyme Fam20C (serine kinase) is responsible, at least in part, for the phosphorylation of caseins. Both the calcium phosphate and hydrophobic interactions between casein molecules are involved in the stability of the micelle (Bauman et al, 2006). In some embodiments, by co-expression with a kinase targeting casein, the phosphorylation increases the stability of the protein and creates a shield against protein degradation, as shown in FIG. 11A-FIG. 11E.

[0898] Cassettes (combinations of promoter, signal peptide and terminator) have been built and different fusions were assembled with various transgenes of interest (e.g., milk proteins). The kinase (Fam20C) was co-expressed in a different cassette and part of the same binary vector (cointegration of cassette kinase and cassette GOI, see percent events accumulating the recombinant protein at Table 77.

TABLE 77
Co-expression with kinase (Fam20C) provides increased protein
accumulation when caseins are in a multimeric form

| | | | Percent of events | |
|---|---|---|---|---|
| | | | accumulating the | |
| | | total | recombinant protein | |
| | | events | at the concentration: | |
| | | analyzed | 0-2% TSP | >2% TSP |
| No | BC | 39 | 100 | 0 |
| Kinase | KCN-BC | 48 | 100 | 0 |
| | BC-KCN | 12 | 100 | 0 |
| | BC-aS1-KCN | 28 | 96.4 | 3.6 |
| Kinase | BC/Fam20C | 9 | 100 | 0 |
| | KCN- | 28 | 7.1 | 92.9 |
| | BC/Fam20C | | | |
| | KCN-BC- | 36 | 38.9 | 61.1 |
| | aS1/Fam20C | | | |

### Example 26: Beta-Casein Fusion Proteins in E. coli and Soy

[0899] A comparative study was completed to determine differences in fusion protein expression in e. coli bacteria vs soy. Either total soluble proteins or inclusion body proteins were extracted from E. coli or Soybean seeds. Total proteins were loaded on SDS-PAGE (total concentrations indicated on the figure). SDS-PAGE was performed according to manufacturer's instructions (Product #5678105 BioRad, Hercules, CA, USA) under denaturing and reducing conditions. For immunoblotting proteins separated by SDS-PAGE were transferred to a PVDF membrane using Trans-Blot® Turbo™ Midi PVDF Transfer Packs (Product #1704157 BioRad) according to manufacturer's guidelines. Membranes were blocked with 3% BSA in phosphate buffered saline with 0.5% Tween-20, reacted with antigen specific antibody and subsequently reacted with fluorescent goat anti rabbit IgG (Product #60871 BioRad, CA). Membranes were scanned according to manufacturer's instructions using the ChemiDoc MP Imaging System (BioRad, CA) and analyzed using ImageLab Version 6.0.1 Standard Edition (Bio-Rad Laboratories, Inc.).

### Results

[0900] Beta-casein fusion proteins do not accumulate (BBKCNLG) or are highly degraded (BC4, BAAB) in E. coli in comparison to soy seeds, see FIG. 41.

### Example 27: Optimization of the Usage of Endogenous Transcription Factors (TFs)

[0901] As recombinant proteins are expressed under the control of seed-specific promoters, corresponding endogenous promoters can be knocked out to free any transcription factors (TFs) which naturally bind. The increased pool of free TFs become available to activate the exogenous promoter that drives the expression of the recombinant protein. In some cases, the endogenous promoter is knocked out in conjunction with part of the coding sequence. In this case, the endogenous protein won't be expressed. This creates an available pool of extra amino acids that can be used by the cell to synthesize the recombinant protein.

[0902] In brief, a minimum of about 500 bp of the Glycinin1 (GmSeed2) promoter sequence immediately upstream of the start codon is removed in conjunction with part of the Glycinin1 coding sequence (about 200 pb) via CRISPR-Cas9 technology, to achieve full endogenous promoter knockout and loss of expression of the glycinin 1 protein. Then, the recombinant protein is expressed behind the Glycinin 1 promoter or any promoter that shares the same pool of TFs. To introduce the recombinant protein in the same plant, three options are possible:

[0903] Option 1: Include GmSeed2 promoter knockout design and recombinant protein expressing cassette in the same T-DNA

[0904] Option 2: Create a GmSeed2 promoter knockout line that will be crossed with a stable line expressing recombinant protein.

[0905] Option 3: Create a GmSeed2 promoter knockout line that will be re-transformed with the construct containing the recombinant protein expressing cassette.

TABLE 78
Exemplary Cassettes for Knock Out of Endogenous Promoters

| Construct | Cassette Detail | CRISPR Target | Target Protein |
|---|---|---|---|
| AR14-21 | Cas9(KO_Gy1- | Glycinin1 | BC-BC-KCN-LG |
| | Pro1)(GmSeed12:coixss:OBC-T3:OBC- | promoter | |
| | T2:OKC1-T:OLG1:EUT:TM6) | | |
| AR14-22 | Cas9(KO_Gy1- | Glycinin1 | BC-BC-KCN-LG |
| | Pro2)(GmSeed12:coixss:OBC-T3:OBC- | promoter | |
| | T2:OKC1-T:OLG1:EUT:TM6) | | |
| AR14-23 | Cas9(KO_Gy1_g139a + g- | Glycinin1 | BC-BC-KCN-LG |
| | 849)(GmSeed12:coixss:OBC-T3:OBC- | promoter | |
| | T2:OKC1-T:OLG1:EUT:TM6) | | |
| AR14-24 | Cas9(KO_Gy1_g139a + g- | Glycinin1 | BC-BC-KCN-LG |
| | 697)(GmSeed12:coixss:OBC-T3:OBC- | promoter | |
| | T2:OKC1-T:OLG1:EUT:TM6) | | |
| AR14-25 | Cas9(KO_Gy1_g139a + g- | Glycinin1 | BC-BC-KCN-LG |
| | 679)(GmSeed12:coixss:OBC-T3:OBC- | promoter | |
| | T2:OKC1-T:OLG1:EUT:TM6) | | |
| AR14-26 | Cas9(KO_Gy1_g200 + g- | Glycinin1 | BC-BC-KCN-LG |
| | 849)(GmSeed12:coixss:OBC-T3:OBC- | promoter | |
| | T2:OKC1-T:OLG1:EUT:TM6) | | |
| AR14-27 | Cas9(KO_Gy1_g200 + g- | Glycinin1 | BC-BC-KCN-LG |
| | 697)(GmSeed12:coixss:OBC-T3:OBC- | promoter | |
| | T2:OKC1-T:OLG1:EUT:TM6) | | |
| AR14-28 | Cas9(KO_Gy1_g200 + g- | Glycinin1 | BC-BC-KCN-LG |
| | 679)(GmSeed12:coixss:OBC-T3:OBC- | promoter | |
| | T2:OKC1-T:OLG1:EUT:TM6) | | |
| AR14-46 | Cas9(KO Gy4 Pro)(GmSeed2:sig2:OBC- | Glycinin4 | BC-BC-KCN-LG |
| | T3:OBC-T2:OKC1-T:OLG1:AtHSP | promoter | |
| | T:AtUbi10T) | | |
| AR14-47 | Cas9(KO Gy4 Pro)(GmSeed2:sig2:OBC- | Glycinin4 | BC-FM-aS1-FM- |
| | T4:FM:OaS1-T2:FM:OaS1-T:FM:OBC- | promoter | aS1-FM-BC |
| | T2:AtHSP T:AtUbi10T) | | |
| AR14-48 | Cas9(KO BconA′ | Beta- | BC-BC-KCN-LG |
| | Pro)(GmSeed2:sig2:OBC-T3:OBC- | Conglycinin a′ | |
| | T2:OKC1-T:OLG1:AtHSP T:AtUbi10T) | subunit promoter | |
| AR14-49 | Cas9(KO BconA′ | Beta- | BC-FM-aS1-FM- |
| | Pro)(GmSeed2:sig2:OBC-T4:FM:OaS1- | Conglycinin a′ | aS1-FM-BC |
| | T2:FM:OaS1-T:FM:OBC-T2:AtHSP | subunit promoter | |
| | T:AtUbi10T) | | |
| AR14-50 | Cas9(KO KTI3 Pro)(GmSeed2:sig2:OBC- | Kunitz Tripsin | BC-BC-KCN-LG |
| | T3:OBC-T2:OKC1-T:OLG1:AtHSP | Inhibitor 3 | |
| | T:AtUbi10T) | Promoter | |
| AR14-51 | Cas9(KO KTI3 Pro)(GmSeed2:sig2:OBC- | Kunitz Tripsin | BC-FM-aS1-FM- |
| | T4:FM:OaS1-T2:FM:OaS1-T:FM:OBC- | Inhibitor 3 | aS1-FM-BC |
| | T2:AtHSP T:AtUbi10T) | Promoter | |

TABLE 79
Exemplary Cassettes
Cassette Details

(GmSeed12:coixss:OBC-T3:OBC-T2:OKC1-T:OLG1:EUT:TM6T)(7mu:ShCas9:NLS:nosT)
Cas9(KO_Gy1-Pro1)(GmSeed12:coixss:OBC-T3:OBC-T2:OKC1-T:OLG1:EUT:TM6T)
Cas9(KO_Gy1-Pro2)(GmSeed12:coixss:OBC-T3:OBC-T2:OKC1-T:OLG1:EUT:TM6T)
Cas9(KO_Gyl_g139a+g-849)(GmSeed12:coixss:OBC-T3:OBC-T2:OKC1-T:OLG1:EUT:TM6T)
Cas9(KO_Gyl_g139a+g-697)(GmSeed12:coixss:OBC-T3:OBC-T2:OKC1-T:OLG1:EUT:TM6T)
Cas9(KO_Gy1_g139a+g-679)(GmSeed12:coixss:OBC-T3:OBC-T2:OKC1-T:OLG1:EUT:TM6T)
Cas9(KO_Gy1_g200+g-849)(GmSeed12:coixss:OBC-T3:OBC-T2:OKC1-T:OLG1:EUT:TM6T)
Cas9(KO_Gy1_g200+g-697)(GmSeed12:coixss:OBC-T3:OBC-T2:OKC1-T:OLG1:EUT:TM6T)
Cas9(KO_Gyl_g200+g-679)(GmSeed12:coixss:OBC-T3:OBC-T2:OKC1-T:OLG1:EUT:TM6T)

### Example 28: Additional Food Compositions

[0906] The present disclosure also teaches edible compositions (i.e., food compositions) comprising recombinant mammalian milk protein, at specified ratios with a one or more secondary proteins. In some embodiments, the compositions comprise specified amounts of milk proteins in soy protein base. This example describes a non-limiting illustrative list compositions envisioned as part of this disclosure.

### Milk Substitute and or Coffee Creamer

[0907] It was hypothesized that recombinant milk proteins of the present disclosure could improve the organoleptic properties of milk substitute products. This hypothesis will be tested by producing one or more milk substitute products as follows.

[0908] The transgenic plants expressing the recombinant fusion proteins described herein are used to produce soy milk. Persons having skill in the art will be familiar with techniques for producing milk. For example, deskinned soybeans are placed in water and blended to produce a soybean mush. The blended mixture is strained to remove particulates, thereby producing a modified soy milk. The soy milk may be homogenized to reduce the droplet size of lipids. Additional lipids may be incorporated to a coffee creamer prior to homogenization. A control soy milk will (or can) be produced from wild type soybeans. The control and modified soy milks are optionally heated to kill pathogens/spoiling agents and increase shelf life.

[0909] The modified soy milk is expected to differ from the control soy milk in that the modified soy milk will contain higher ratios of milk protein to secondary proteins, including 7S globulin glycinin, 11S globulin, Lipoxygenase, and Kunitz Trypsin Inhibitor. These ratios will be measured using protein quantification techniques known in the art (e.g., Western Blot densitometry as described in Example 2).

[0910] The physical and organoleptic properties of the modified and control soy milks will be tested by methods known to those skilled in the art of food science. Viscosity, density, fat droplet size distribution, and emulsion stability will be tested.

[0911] In one illustrative test, the modified and control soy milks are added to separate cups of black coffee. The suitability of the soy milks as coffee creamers will be tested. For example, consistency of the soy milks in the coffee will be assessed visually. Particle size will be tested by methods known in the art, such as using a Malvern Mastersizer light scatter device. Taste tests will also be conducted comparing consumer preference of the modified or control soy milk compared to each other, and (optionally) compared to cow milk. It is expected that the modified soy milk will be a superior coffee creamer compared to the control soy milk.

[0912] In another illustrative test, the modified and control soy milks will be tested alone. For example, the modified and control soy milks will be tested in a consumer panel to assess its organoleptic properties and consumer preference. It is expected that the modified soy milk will be superior to traditional control soy milk.

### Cheese Substitute Compositions

[0913] It was hypothesized that recombinant milk proteins of the present disclosure could improve the organoleptic properties of spreadable cheese. This hypothesis will be tested by producing and testing soft cheeses as follows.

[0914] The transgenic plants expressing the recombinant fusion proteins described herein are used to produce soy milk. Persons having skill in the art will be familiar with techniques for producing milk. For example, deskinned soybeans are placed in water and blended to produce a soybean mush. The blended mixture is strained to remove particulates, thereby producing a modified soy milk. The soy milk may be homogenized to reduce the droplet size of lipids. Additional lipids may be incorporated prior to curdling. A control soy milk will produced from wild type soybeans. The next step is to make the spreadable cheese.

[0915] The control and modified soy milks are heated to boiling. Lemon juice or another acid is added to curdle the milk. The curdled mixture is sieved to collect particulates. The curdled particulates are then blended with optional seasonings (e.g., salt). The resulting product is a spreadable cheese made from the modified soymilk and a control spreadable cheese.

[0916] The modified spreadable cheese is expected to differ from the control cheese in that the modified spreadable cheese will contain higher ratios of milk protein to secondary proteins, including 7S globulin glycinin, 11S globulin, lipoxygenase, and kunitz trypsin inhibitor. These ratios will be measured using protein quantification techniques known in the art (e.g., Western Blot densitometry as described in Example 2).

[0917] The physical and organoleptic properties of the modified and control spreadable cheeses will be tested by methods known to those skilled in the art of food science. Density, rheology, thickness, spreadability, and stability will be tested. Particle size will be tested by methods known in the art, such as using a Malvern Mastersizer light scatter device. Protein content and protein quality will also be measured.

[0918] Taste tests will also be conducted comparing consumer preference of the modified or control spreadable cheeses., and (optionally) compared to spreadable cheeses made from cow milk. It is expected that the modified spreadable cheese will be superior in one or more properties compared to the control spreadable cheese made from traditional soy milk.

### Ice Cream Substitute Compositions

[0919] It was hypothesized that recombinant milk proteins of the present disclosure could improve the organoleptic properties of ice cream. This hypothesis will be tested by producing and testing ice cream as follows.

[0920] The transgenic plants expressing the recombinant fusion proteins described herein are used to produce soy milk. Persons having skill in the art will be familiar with techniques for producing milk. For example, deskinned soybeans are placed in water and blended to produce a soybean mush. The blended mixture is strained to remove particulates, thereby producing a modified soy milk. The soy milk is homogenized to reduce the droplet size of lipids. Additional lipids may be incorporated to a coffee creamer prior to homogenization. A control soy milk will be produced from wild type soybeans. The next step is to make the ice cream.

[0921] There are many recipes for producing ice cream. One example recipe is to separately mix the control and modified soy milks with egg yolks and (optionally) corn starch, sugar, and/or a flavoring. The mixtures are then heated and cooled in a mixer ice cream maker. The resulting product is an ice cream made from the modified soymilk and a control ice cream made from wild type control soy milk.

[0922] The modified ice cream is expected to differ from the control ice cream in that the modified spreadable cheese will contain higher ratios of milk protein to secondary proteins, including 7S globulin glycinin, 11S globulin, lipoxygenase, and kunitz trypsin inhibitor. These ratios will be measured using protein quantification techniques known in the art (e.g., Western Blot densitometry as described in Example 2).

[0923] The physical and organoleptic properties of the modified and control spreadable cheeses will be tested by methods known to those skilled in the art of food science. Density, thickness, flow, and stability will be tested. Particle size will be tested by methods known in the art, such as using a Malvern Mastersizer light scatter device. Protein content and protein quality will also be measured.

[0924] Taste tests will also be conducted comparing consumer preference of the modified or control ice cream. It is expected that the modified ice cream will be superior in one or more properties compared to the control ice cream made from traditional soy milk. Infant Formula Nutritional formulas

[0925] It was hypothesized that recombinant milk proteins of the present disclosure could improve the organoleptic properties of infant formula or other nutritional formula drinks. This hypothesis will be tested by producing and testing formulates and/or nutritional formulas. These products will be produced using standard recipes and the resulting products will be assess as done for other products in this example. Products made from modified soybean milk are expected to be superior to control products made from traditional soy milk. Experimental Products Recreated from Soy Milk and Cow Milk

[0926] The modified soy milks used above are expected to have the added benefit that they will lack allergens/irritants associated with cow milk. The modified soy milks do not require harvesting of milk from cows and is therefore expected to have additional food-safety benefits, and would also be considered cruelty-free.

[0927] Some of the organoleptic and flavor benefits described above may also be tested by producing soy milk+milk mixtures to replicate the expected benefits of the modified soy milk of the present disclosure.

### Example 29: Fatty Acid Profile Match

[0928] This disclosure teaches that altering fatty acid profiles of plant-based products can improve the properties and flavor of those products. This example demonstrates how plant-based products can be made to better mimic their animal-based counterparts through the fortification with short chain fatty acids.

[0929] The present disclosure teaches plants and plant-based products that better mimic animal products due to their expression of one or more milk proteins. This example demonstrates how these plant and plant-based products can be further enhanced through fatty acid profile matching.

[0930] Milkfats have diverse fatty acid profiles and are higher in short chain fatty acids (SCFA) than plant fats. (Markiewicz-Keszycka, M., Czyzak-Runowska, G., Lipinska, P., & Wójtowski, J. 2013. Fatty acid profile of milk—A review. Bulletin of the Veterinary Institute in Pulawy, 57(2), 135-139) In general, milk triacyglycerides also melt at body temperature. Palm oil has a similar melt point to milk fat, but two fatty acids, C16:0 and C18:1, represent 85% of the fatty acid profile and C18:2 contributes another 10%. Palm oil is used to replace milkfat in a number of applications including frozen desserts. While its texture is close to milkfat, it lacks the flavor release of butter. Coconut oil has a lower melt point than milkfat and is also used in some dairy alternatives. The melting profile of coconut oil is much steeper than milkfat and it does not release flavors as quickly as milkfat. The high level of C12:0 can impart a soapy flavor to products. Plant based oils (e.g. soy, sunflower, canola, etc.) have a high level of unsaturated fatty acids that impart a very low melting point and are susceptible to oxidative rancidity. These lipids are preferred for their low cost but are generally considered inferior to harder fats in most food applications. Hydrogenation is used to impart properties that are closer to animal fats. Modification of the fatty acid profile of soybean oil to impart properties of milkfat can be achieved by increasing the level of SCFA, increasing the level of saturated fats, and/or decreasing the level of unsaturation. An exemplary enhanced soybean oil is shown in Table 80, below.

TABLE 80
Fatty acid compositions of soybean oil, enhanced
soybean oil, palm oil, coconut oil, and butterfat
(fatty acids contributing <1% not shown)

| Fatty | Soybean | SCFA | Coconut | Palm | |
|---|---|---|---|---|---|
| acid | oil | soybean oil | oil | oil | Butterfat |
| C4:0 | — | 8.0% | — | — | 4.3% |
| C6:0 | — | 4.0% | — | — | 2.7% |
| C8:0 | — | 3.0% | 8.0% | — | 1.6% |
| C10:0 | — | — | 6.4% | — | 3.4% |
| C12:0 | — | — | 47.7% | — | 3.5% |
| C14:0 | — | — | 18.0% | 1.1% | 10.0% |
| C16:0 | 11.0% | 11.0% | 8.8% | 46.0% | 29.2% |
| C16:1 | — | — | — | — | 1.3% |
| C18:0 | 4.7% | 4.0% | 3.0% | 4.6% | 13.5% |
| C18:1 | 23.7% | 26.3% | 6.2% | 38.7% | 26.9% |
| C18:2 | 53.5% | 40.2% | 1.9% | 9.6% | 3.7% |
| C18:3 | 7.1% | 3.6% | — | — | — |

[0931] This example will blend lipids into various plant-based products to modulate the fatty acid profile to better match the properties of animal products. A soybean oil with high levels of SCFA combined with other lipid sources is expected to give an improved fat for use in dairy alternatives. The control and modified soy milks of Example 21 will be fortified with a blend of various plant-based oils/fats to mimic the fatty acid profile of milk and/or butter.

[0932] For example, the control and modified soy milks of Example 21 will be blended with about 50% soybean oil, 25% palm oil and 25% coconut oil. The resulting blend is expected to better mimic the fatty acid profile of animal butter. See Table 81, below.

TABLE 81
Fatty acid composition of butterfat vs. a blend of
50% SCFA soybean oil, 25% palm oil and 25% coconut
oil (fatty acids contributing <1% not shown).

| Fatty | | Soybean | SCFA soy + |
|---|---|---|---|
| acid | Butterfat | Oil | PO + CO |
| C4:0 | 4.30% | 0 | 4.00% |
| C6:0 | 2.70% | 0 | 2.20% |
| C8:0 | 1.60% | 0 | 3.50% |
| C10:0 | 3.40% | 0 | 1.60% |
| C12:0 | 3.50% | 0 | 11.80% |
| C14:0 | 10.00% | 0 | 4.70% |
| C16:0 | 29.20% | 11.00% | 19.20% |
| C16:1 | 1.30% | 0 | 0 |
| C18:0 | 13.50% | 4.70% | 3.90% |
| C18:1 | 26.90% | 23.70% | 24.40% |
| C18:2 | 3.70% | 53.50% | 23.00% |
| C18:3 | 0 | 7.10% | 1.80% |

[0933] The expected fatty acid profile modulation is also presented visually in FIG. 42. Soybean oil fatty acid profiles differ, particularly with respect to longer chain fatty acids (Lee, J.-D., Bilyeu, K. D., & Shannon, J. G. 2007. Genetics and Breeding for Modified Fatty Acid Profile in Soybean Seed Oil. Journal of Crop Science and Biotechnology, 10(4), 201-210). The blend of 50% SCFA soybean oil, 25% palm oil and 25% coconut oil better matches that of butter.

[0934] Additional blends will be created, for example, using palm stearin, a fractionated palm oil higher in saturated fatty acids or by reducing the amount of SCFA soybean oil relative to harder fats. In some embodiments, this plant-based blend can replace butter in food compositions/recipes of the present disclosure.

[0935] The resulting products will be evaluated for differences in their physical properties and tastes. Specifically, the compositions of Example 28 will be fortified with various fatty acid blends to better match the profiles of animal products, including milk and butter. It is expected that fatty acid profile matched products will exhibit one or more properties superior to that of non-matched products.

### Example 30: Phosphorylation Patterns of Recombinant Proteins Expressed in Plants Vs Corresponding Proteins in a Bovine

[0936] The phosphorylation pattern of a beta-casein produced in plants versus a beta casein produced by bovine was analyzed using mass spectrometry after trypsin or chymotrypsin digestion. Two peptides were detected presenting a phosphorylation pattern in the bovine casein which was differed from the plant version.

[0937] For the peptide FQSEEQQQTEDELQDK (SEQ ID NO: 955), in the bovine, the ratio phosphorylated/non phosphorylated was 1 to 1 whereas in the plant recombinant protein the ratio was 1 to 10 suggesting very little phosphorylation in the plant recombinant protein.

[0938] For the peptide NVPGEIVESL (SEQ ID NO: 956), in the bovine, the ratio phosphorylated/non phosphorylated was 1 to 1 whereas in the plant recombinant protein the ratio was 1 to 2 suggesting less phosphorylation in the plant recombinant protein.

[0939] Prediction for phosphorylation in the bovine version.

>OBC-T2 (Bovine)
(SEQ ID NO: 913)
RELEELNVPGEIVESLSSSEESITRINKKIEKFQSEEQQQTEDELQDKI
HPFAQTQSLVYPFPGPIPNSLPQNIPPLTQTPVVVPPFLQPEVMGVSKV
KEAMAPKHKEMPFPKYPVEPFTESQSLTLTDVENLHLPLPLLQSWMHQP
HQPLPPTVMFPPQSVLSLSQSKVLPVPQKAVPYPQRDMPIQAFLLYQEP
VLGPVRGPFPIIV

[0940] S: Serine phosphorylation sites in bovine annotated on UniProt.

[0941] NVPGEIVESL (SEQ ID NO: 956) and FQSEEQQQTEDELQDK (SEQ ID NO: 955): peptides found in our study to be phosphorylated in bovine and to a lesser extent in plants.

### Example 31: Universal Vector Designs

[0942] Various universal vector designs are generated to increase expression of heterologous (e.g., bovine milk) proteins in plants. A universal vector can comprise a seed-specific promoter; a signal peptide; and a double terminator in an exemplary configuration. Alternate elements can be employed.

TABLE 82
Exemplary Universal Vector Designs
Exemplary Design
Seed-specific promoter:Signal Peptide(SP):GOI:terminator

| Exemplary | | | |
|---|---|---|---|
| promoter | Exemplary SP | GOI | Terminator |
| PvPhas, | GmSCB1, StPat21, | α-S1 casein, | AtHSP:AtUbi10, |
| BnNap, | 2Sss, Sig2, Sig12, | α-S2 casein, | EU:TM6 |
| AtOle1, | Sig8, Sig10, Sig11, | β-casein, | |
| GmSeed2, | and Coixss. | κ-casein, | |
| GmSeed3, | | para-κ-casein, | |
| GmSeed5, | | β-lactoglobulin, | |
| GmSeed6, | | α-lactalbumin, | |
| GmSeed7, | | lysozyme, | |
| GmSeed8, | | lactoferrin, | |
| GmSeed10, | | lactoperoxidase, | |
| GmSeed11, | | serum albumin, | |
| GmSeed12, | | and/or an | |
| pBCON, | | immunoglobulin. | |
| GmCEP1-L, | | | |
| GmTHIC, | | | |
| GmBg7S1, | | | |
| GmGRD, | | | |
| GmOLEA, | | | |
| GmOLER, | | | |
| Gm2S-1, and | | | |
| GmBBld-II | | | |

[0943] Exemplary designs are shown in Table 83 below and in FIG. 45A-FIG. 45D and FIG. 46A-FIG. 46G.

TABLE 83
Exemplary universal vectors
Universal design

| Plasmid ID | Cassette detail |
|---|---|
| AR15-143 | Rb7:GmSeed2:sig2:GFP:AtHSP T:AtUbi10T:Rb7 |
| AR15-255 | Rb7:GmSeed2:sig2:OBC-T5:OBC-T4:OBC-T3:OBC-T2:AtHSP T:AtUbi10T:Rb7 |
| AR15-256 | Rb7:GmSeed2:sig2:OBC-T3:OBC-T2:OKC1-T:OLG1:AtHSP T:AtUbi10T:Rb7 |
| AR15-448 | Rb7:GmSeed2:sig2:OBC-T5:OBC-T4:OBC-T3:OBC-T2:PFPS:AtHSP T:AtUbi10T:Rb7 |
| AR15-449 | Rb7:GmSeed2:sig2:OBC-T3:OBC-T2:OKC1-T:OLG1:PFPS:AtHSP T:AtUbi10T:Rb7 |
| AR15-478 | Rb7:GmSeed2:sig2:OBC-T4:OaS1-T2:OaS1-T:OBC-T2:PFPS:AtHSP T:AtUbi10T:Rb7 |
| AR15-479 | Rb7:GmSeed2:sig2:OKC1-T:OBC-T4:OBC-T3:OBC-T2:PFPS:AtHSP T:AtUbi10T:Rb7 |
| AR15-490 | Rb7:GmSeed2:sig2:OOVAL2 (intron 1):PFPS:AtHSP T:AtUbi10T:Rb7 |
| AR15-491 | Rb7:GmSeed2:sig2:OLG2 (intron 2):PFPS:AtHSP T:AtUbi10T:Rb7 |
| AR15-492 | Rb7:GmSeed2:sig2:GFP:PFPS:AtHSP T:AtUbi10T:Rb7 |
| AR15-493 | Rb7:GmSeed2:sig2:GmLBC2:PFPS:AtHSP T:AtUbi10T:Rb7 |
| AR15-494 | Rb7:GmSeed2:GmLBC2:AtHSP T:AtUbi10T:Rb7 |
| AR15-517 | Rb7:GmSeed2:sig2:OBC-T4:OaS1-T2:OaS1-T:OBC-T2:AtHSP T:AtUbi10T:Rb7 |
| AR15-518 | Rb7:GmSeed2:sig2:OKC1-T:OBC-T4:OBC-T3:OBC-T2:AtHSP T:AtUbi10T:Rb7 |
| AR15-519 | Rb7:GmSeed2:sig2:OOVAL2 (intron 1):AtHSP T:AtUbi10T:Rb7 |
| AR15-520 | Rb7:GmSeed2:sig2:OLG2 (intron 2):AtHSP T:AtUbi10T:Rb7 |
| AR15-521 | Rb7:GmSeed2:sig2:GmLBC2:AtHSP T:AtUbi10T:Rb7 |

[0944] Plants were transformed with select exemplary constructs and protein expression was evaluated by ELISA, see Table 84 below and FIG. 47A (graphical representation of ELISA results for BC-BC-BC-BC constructs) and FIG. 47B (graphical representation of western blot results for BC-BC-BC-BC constructs).

TABLE 84
Protein Quantification by ELISA for BC-BC-BC-BC constructs

| | | | | Number of |
|---|---|---|---|---|
| Construct | Design | | p-value | Plants |
| AR15-308 | no sig2 | Control | | 10 |
| (FIG. 45A) | | | | |
| AR15-231 | sig2 | | 0.145 | 9 |
| (FIG. 45B) | | | | |
| AR15-253 | TM6 + sig2 | | 0.003 | 7 |
| (FIG. 45D) | | | | |
| AR15-255 | Rb7 + sig2 | | 0.0002 | 10 |
| (FIG. 45D) | | | | |
| AR15-271 | sig2 + KDEL | | 0.014 | 10 |
| (FIG. 45C) | | | | |
| AR15-301 | sig2 + ctVSD | | 0.062 | 9 |
| (FIG. 45C) | | | | |
| AR15-307 | sig2 + PFPS | | 0.0014 | 9 |
| (FIG. 45C) | | | | |

TABLE 85
Protein Quantification by Western
Blot for BC-BC-BC-BC constructs

| | | | | Number of |
|---|---|---|---|---|
| Construct | Design | | p-value | Plants |
| AR15-308 | no sig2 | Control | | 10 |
| AR15-231 | sig2 | | 1 | 9 |
| AR15-253 | TM6 + sig2 | | 0.023 | 7 |
| AR15-255 | Rb7 + sig2 | | 0.0007 | 10 |
| AR15-271 | sig2 + KDEL | | 0.146 | 10 |
| AR15-301 | sig2 + ctVSD | | 0.299 | 9 |
| AR15-307 | sig2 + PFPS | | 0.006 | 9 |

[0945] In a prophetic experiment, plants will be transformed with any configuration of the exemplary construct of Table 82. Protein expression will be evaluated by ELISA and Western Blot. Constructs yielding high protein expression will be selected.

### Example 32: Bovine Isolated Milk Proteins Improve Soy-Based Cheese Products

[0946] Cheese making has relied on dairy milk (e.g., bovine milk) as the major ingredient for over four thousand years. Dairy cheese is usually made from curds formed from dairy milk. Dairy milk can readily be made to form curds suitable for making cheese by contacting the dairy milk with rennet (an aspartic protease which cleaves kappa-casein) at mildly acidic pH. A variety of non-dairy cheese analogs are available that contain soy products (e.g., soymilk powder, soy protein, or soy flour), oils, and various thickeners. However, the taste and texture of such products does not match that of dairy-based cheeses. For example, soy “cheeses” are often curdled soy protein (i.e., tofu) that lacks the defining melt and stretch properties of true cheese.

[0947] To evaluate the effect of the use of bovine-isolated milk proteins on melt and stretch of cheese, various cheeses were produced utilizing protocols of the disclosure using different soy-to-casein ratios, ranging from no soy to 100% soy. Cheeses were generated according to the designs of Table 86.

TABLE 86
Experimental Designs

| | | | % Soy | | |
|---|---|---|---|---|---|
| | Source of | % Dairy | Protein | % Total | Ratio of |
| Sample ID | Dairy Protein | Protein | Isolate | Protein | Soy:Casein |
| C | AC + BC | 7.5 | 7.5 | 15 | 1:1 |
| D | AC + BC | 3.75 | 11.25 | 15 | 3:1 |
| E | None | 0 | 15 | 15 | 0:1 |
| H | Rennet Casein | 7.5 | 7.5 | 15 | 1:1 |
| I | Rennet Casein | 3.75 | 11.25 | 15 | 3:1 |
| L | AC + BC | 9 | 9 | 18 | 1:1 |
| M | AC + BC | 4.5 | 13.5 | 18 | 3:1 |
| Q | Rennet Casein | 9 | 9 | 18 | 1:1 |
| R | Rennet Casein | 4.5 | 13.5 | 18 | 3:1 |

[0948] The rennett 7.5% entry will repeated.

[0949] The cheeses of Table 86 were cooked according to the program schedule below and analyzed according to the parameters of Table 87.
[0950] Cheese premix 2 (00:00:00 Temp 50; 00:00:00 Speed 500; 00:05:00 End).
[0951] Cheese premix 3 (00:00:00 Temp 40; 00:00:00 Speed 200; 00:02:00 Speed 500; 00:05:00 End).
[0952] Cheese make 8-21 (00:00:00 Temp 95; 00:00:00 Speed 960; 00:01:00 Speed 500; 00:01:00 Temp 90; 00:02:00 Temp 85; 00:03:00 End).

TABLE 87
Properties of Cheese Compositions

| | | Premix #3 | | Cheese make 8-21 | | | |
|---|---|---|---|---|---|---|---|
| | pH | Time | Viscosity | Time | Viscosity | Trend | Comments |
| C | 5.66 | 5:00 | 504 | 0:46 | 3380 | decreasing | smooth, still pretty stretchy |
| D | 5.96 | 5:00 | 1696 | 1:25 | 3153 | decreasing | smooth, very little stretch |
| E | 5.64 | 5:00 | 1903 | 1:11 | 680 | decreasing | pasty, not stretchy |
| H | 5.36 | 2:30 | 290 | 1:12 | 391 | decreasing | same as A |
| I | 5.58 | 2:30 | 580 | 1:14 | 2149 | decreasing | smooth, stringy |
| L | 5.72 | 5:00 | 1319 | 0:44 | 5494 | increasing | smooth, v. sl. stretchy |
| M | 6.02 | 5:00 | 3607 | 1:17 | 4348 | increasing | pasty, no stretch |
| Q | 5.37 | 5:00 | 1357 | 0:41 | 5714 | increasing | smooth, somewhat stretchy |
| R | 5.51 | 5:00 | 2696 | 0:52 | 6396 | increasing | pasty, fluffy, not stretchy |

[0953] Cheese melt and stretch was determined after a 6 minute incubation at 450° F. according to the scoring mechanism whereby cheese firmness is assigned a score of 0 (Very Soft), 1 (slightly soft), 2 (soft), 3 (semi-firm), 4 (firm), and 5 (very firm). Melt score was determined as provided in Table 88. A composite score was also calculated by taking the sum of the firmness and melt of each representative cheese.

TABLE 88
Melt Quantification Metric

| % Pan Coverage | Melt Score |
|---|---|
| No change | 0 |
| 0-25 | 1 |
| 25-50 | 2 |
| 50-75 | 3 |
| >75 | 4 |

### Results

[0954] Sample cheeses were analyzed for firmness and melt, results are provided in Table 89 below. Representative images are shown in FIG. 48B-FIG. 48J.

TABLE 89
Cheese Firmness and Melt

| | Melt/stretch comments (450° F., 6 minutes) | | | |
|---|---|---|---|---|
| ID | Melt Score | Stretch | Comments | Firmness Score |
| C | 2 | 3 cm | firm, springy | 4 |
| D | 1 | 0 cm | firm, springy | 4 |
| E | 0 | 0 cm | softer, not springy | 3 |
| H | 0 | 0 cm | slightly less firm, springy | 3 |
| I | 1 | 0 cm | softer, not springy | 2 |
| L | 2.5 | 2 cm | firm, springy | 4 |
| M | 1 | 0 cm | firm, springy | 4 |
| Q | 1 | 4 cm | very firm, not springy | 5 |
| R | 1 | 0 cm | slightly less firm, springy | 3 |

[0955] Results show that the addition of even the smallest amount of casein imparts the food composition with melt and stretch properties of cheese. As shown in FIG. 48A, the 100% soy cheese has no melt or stretch. When bovine isolated casein is added, the melt and stretch composite score increases, thereby resulting in a plant-based cheese product that more closely resembles natural dairy cheese.

### Example 33: Cheese Food Compositions

[0956] Various cheese food products can be manufactured utilizing the compositions of the disclosure. Using vector constructs encoding only a subset of milk proteins, as described in the aforementioned examples, a subset of milk proteins have been used to generate completely novel cheeses. The novel cheeses are made with only a subset of milk proteins (e.g., with any of the combinations provided herein), those milk proteins having been expressed from dicotyledonous plants (e.g., soybean).

### Mozzarella-Style Cheese

[0957] A mozzarella-style cheese was generated using soymilk extracted from harvested soybeans from a κ-casein expressing soybean plan. The soymilk was mixed with plant fats, sugars, chymosin, and cultures to form a cheese curd. The curd was then separated from the liquid phase, and was evaluated for its sensory properties. The resulting mozzarella-type cheese exhibited melt and stretch similar to that of animal cheeses, while only comprising the transgenically expressed κ-casein and no other casein proteins. An image of the mozzarella cheese is provided at FIG. 44A.

### Soft Cheese

[0958] A soft cheese was also produced from soymilk of the κ-casein expressing soybean plant. Soymilk containing plant-produced κ-casein was mixed with plant fats, sugars, chymosin, and cultures to form a cheese curd. The resulting soft cheese exhibited similar flavor and texture to that of animal soft cheese, despite only comprising transgenically expressed κ-casein and no other casein proteins. An image of the soft cheese is provided at FIG. 44B.

### Example 34: Soybean Varieties Amenable to Recombinant Milk Protein Production

[0959] The inventors will select a soybean variety from Tables 23-31 and perform one or more of the various genomic architecture alterations of the present disclosure to the variety. These genetic edits/genomic modifications will create robust biofactories to produce recombinant proteins.

[0960] In one experiment, the inventors will perform genomic modifications to enable the soybean varieties to produce recombinant milk proteins. The genetically modified soybean seed will comprise at least one of the following genetic modifications: a recombinant DNA construct encoding a fusion protein comprising at least one milk protein; a recombinant DNA construct encoding a protein capable of forming a protein body; a recombinant DNA construct encoding a prolamin; a first recombinant DNA construct encoding a milk protein and a second recombinant DNA construct encoding a prolamin; a recombinant DNA construct encoding a milk protein that has been modified to have an amino acid sequence different from the native animal expressed milk protein; a recombinant DNA construct encoding a milk protein that has been modified to promote addition of a post-translational modification; a recombinant DNA construct encoding a milk protein that has been modified to prevent addition of a post-translational modification; a recombinant DNA construct encoding an enzyme that alters post-translational modification of protein; a recombinant DNA construct encoding an enzyme capable of modifying a protein; a recombinant DNA construct encoding a kinase; or a genetic modification that modulates the expression of a plant protease.

[0961] The inventors expect the genetically modified soybean biofactories to produce significant recombinant milk protein per acre of planted soybean, as detailed in Example 21.

### Milk Protein Sequences

[0962] The following Table 90 describes various representative species of milk proteins exemplified in the disclosure.

TABLE 90
Milk Protein Sequences of the Disclosure

| | | | |
|---|---|---|---|
| SEQ | | | Accession |
| ID NO | Description | Genus/species | Number |

Kappa casein sequences

| | | | |
|---|---|---|---|
| 3 | Optimized kappa-casein | Artificial (codon optimized | |
| | truncated version 1 | Bos taurus) | |
| | (OKC1-T) | | |
| 4 | Optimized kappa-casein | Bos taurus | |
| | truncated version 1 | | |
| | (OKC1-T) | | |
| 85 | Kappa casein | Capra hircus | |
| 86 | Kappa casein | Ovis aries | |
| 87 | Kappa casein | Bubalus bubalis | |
| 88 | Kappa casein | Camelus dromedaries | |
| 89 | Kappa casein | Camelus bactrianus | |
| 90 | Kappa casein | Bos mutus | |
| 91 | Kappa casein | Equus caballus | |
| 92 | Kappa casein | Equus asinus | |
| 93 | Kappa casein | Rangifer tarandus | |
| 94 | Kappa casein | Alces alces | |
| 95 | Kappa casein | Vicugna pacos | |
| 96 | Kappa casein | Bos indicus | |
| 97 | Kappa casein | Lama glama | |
| 98 | Kappa casein | Homo sapiens | |
| 148 | Kappa casein | Bos taurus | NP_776719.1 |
| 149 | | | AAI02121.1 |
| 150 | | | AAA30433.1 |
| 151 | | | AAB26704.1 |
| 152 | | | 1406275A |
| 153 | | | AAF72097.1 |
| 154 | | | AAD32139.1 |
| 155 | | | XP_024848756.1 |
| 156 | | | CAF03625.1 |
| 157 | | | ABN42697.1 |
| 158 | | | AAD32140.1 |
| 159 | | | ALC76014.1 |
| 160 | | | DAA28589.1 |
| 161 | | | ADT82665.1 |
| 162 | | | ADT82666.1 |
| 163 | | | CAH56573.1 |
| 164 | | | ADT82669.1 |
| 165 | Kappa casein | Capra hircus | QIZ03342.1 |
| 166 | | | AYN74373.1 |
| 167 | | | AAM12026.1 |
| 168 | | | AFZ92921.1 |
| 169 | | | NP_001272516.1 |
| 170 | | | AAM12027.1 |
| 171 | | | AAR06605.1 |
| 172 | | | AAL90873.1 |
| 173 | | | AFZ92919.1 |
| 174 | | | QIZ03345.1 |
| 175 | | | AAR91623.1 |
| 176 | | | AAK17010.1 |
| 177 | | | AAL93193.1 |
| 178 | | | AFZ92918.1 |
| 179 | | | AAL90872.1 |
| 180 | | | AFZ92917.1 |
| 181 | | | AA039432.1 |
| 182 | | | AAL90871.1 |
| 183 | | | AAO39431.1 |
| 184 | Kappa casein | Ovis aries | NP_001009378.1 |
| 185 | | | AAP69943.1 |
| 186 | Kappa casein | Bubalus bubalis | NP_001277901.1 |
| 187 | | | AXE74388.1 |
| 188 | | | APQ30586.1 |
| 189 | | | AXE74385.1 |
| 190 | | | XP_006071184.1 |
| 191 | | | AXE74386.1 |
| 192 | Kappa casein | Bos mutus | XP_005897104.1 |
| 193 | | | XP_014334109.1 |
| 194 | | | MXQ92034.1 |
| 195 | Kappa casein | Bos indicus | XP_019818432.1 |
| 196 | | | ACF15188.1 |
| 197 | | | ACF15186.1 |
| 198 | | | ACF15190.1 |
| 199 | | | ABY81250.1 |
| 200 | | | ABY81251.1 |
| 20 | | | ADT82668.1 |
| 202 | | | ADT82663.1 |
| 203 | | | ADT82671.1 |
| 204 | | | ADT82670.1 |
| 205 | | | AAQ73171.1 |
| 206 | Kappa casein | Jeotgalicoccus coquinae | WP_188357548.1 |
| 207 | (Hypothetical Protein) | | WP_188357549.1 |
| 208 | Kappa casein isoform X1 | Bison bison bison | XP_010837415.1 |
| 209 | | | XP_010837416.1 |
| 210 | Kappa casein | Bos grunniens | AFM93768.1 |
| 211 | | | AXE74296.1 |
| 212 | | | AAM25910.1 |
| 213 | | | ABU53615.1 |
| 214 | | | AAM25909.1 |
| 215 | | | AAF63191.1 |
| 216 | Kappa casein | Bos indicus × Bos taurus | AAF72096.1 |
| 217 | | | AAF72098.1 |
| 218 | Kappa casein (precursor) | Oreamnos americanus | P50423.1 |
| 219 | Kappa casein (precursor) | Naemorhedus goral | P50422.1 |
| 220 | Kappa casein | Odocoileus virginianus texanus | XP_020729185.1 |
| 221 | Kappa casein (precursor) | Capricornis sumatraensis | P50420.1 |
| 222 | Kappa casein (precursor) | Capricornis crispus | BAA03287.1 |
| 223 | | | P42156.1 |
| 224 | Kappa casein (precursor) | Capricornis swinhoei | P50421.1 |
| 225 | Kappa casein (precursor) | Saiga tatarica | P50425.1 |
| 226 | Kappa casein (precursor) | Rupicapra rupicapra | P50424.1 |
| 227 | Kappa casein (precursor) | Cervus nippon | P42157.1 |
| 228 | Kappa casein | Bos frontalis | ADF58295.1 |
| 229 | Kappa casein | Muntiacus reevesi | KAB0354473.1 |
| | (hypothetical protein | | |
| | FD755_023011) | | |
| 230 | Kappa casein | Muntiacus muntjak | KAB0341224.1 |
| | (hypothetical protein | | |
| | FD754_018150) | | |
| 231 | Kappa casein | Madoqua saltiana | AFY03578.1 |
| 232 | Kappa casein | Gazella dorcas | AFY03574.1 |
| 233 | Kappa casein | Gazella arabica | AFY03576.1 |
| 234 | Kappa casein | Capra ibex ibex | AAP80529.1 |
| 235 | Kappa casein | Ovis ammon severtzovi | ADB66396.1 |
| 236 | Kappa casein | Ovis orientalis gmelini | ADB66423.1 |
| 237 | | | ADB66420.1 |
| 238 | Kappa casein | Cervus hanglu yarkandensis | KAF4013038.1 |
| | (hypothetical protein | | |
| | G4228_004474) | | |
| 239 | Kappa casein | Procapra gutturosa | AFY03581.1 |
| 240 | | | AFY03580.1 |
| 1 | Optimized para-kappa- | Artificial (codon optimized | |
| | casein truncated version | Bos taurus) | |
| | 1 (paraOKC1-T) | | |
| 2 | Optimized para-kappa- | Bos taurus | |
| | casein truncated version | | |
| | 1 (paraOKC1-T) | | |
| 241 | Kappa casein isoform X1 | Bos taurus | AAA30433.1 |
| 242 | | | 1406275A |
| 243 | | | AAI02121.1 |
| 244 | | | NP_776719.1 |
| 245 | | | DAA28589.1 |
| 246 | | | AAB26704.1 |
| 247 | | | XP_024848756.1 |
| 248 | | | ABN42697.1 |
| 249 | | | AAF72097.1 |
| 250 | | | 721588A |
| 25 | | | AAD32139.1 |
| 252 | | | AAD32140.1 |
| 253 | | | CAF03625.1 |
| 254 | Kappa casein | Jeotgalicoccus coquinae | WP_188357548.1 |
| 255 | (hypothetical protein) | | WP_188357549.1 |
| 256 | Kappa casein isoform X1 | Bos mutus | XP_005897104.1 |
| 257 | | | XP_014334109.1 |
| 258 | | | MXQ92034.1 |
| 259 | Kappa casein | Bos indicus | XP_019818432.1 |
| 260 | | | ACF15188.1 |
| 261 | | | ABY81250.1 |
| 262 | | | ABY81251.1 |
| 263 | | | ACF15186.1 |
| 264 | | | ACF15190.1 |
| 265 | | | ADT82668.1 |
| 266 | Kappa casein | Bos grunniens | AXE74296.1 |
| 267 | | | AFM93768.1 |
| 268 | | | AAM25910.1 |
| 269 | | | AAM25909.1 |
| 270 | | | ABU53615.1 |
| 271 | Kappa casein isoform X1 | Bison bison bison | XP_010837415.1 |
| 272 | | | XP_010837416.1 |
| 273 | Kappa casein (precursor) | Bubalus bubalis | NP_001277901.1 |
| 274 | | | XP_006071184.1 |
| 275 | | | AXE74388.1 |
| 276 | | | AXE74385.1 |
| 277 | | | APQ30586.1 |
| 278 | | | AXE74386.1 |
| 279 | Kappa casein (precursor) | Oreamnos americanus | P50423.1 |
| 280 | Kappa casein (precursor) | Capricornis swinhoei | P50421.1 |
| 281 | Kappa casein (precursor) | Naemorhedus goral | P50422.1 |
| 282 | Kappa casein (precursor) | Capricornis sumatraensis | P50420.1 |
| 283 | Kappa casein (precursor) | Capricornis crispus | BAA03287.1 |
| 284 | | | P42156.1 |
| 285 | Kappa casein (precursor) | Saiga tatarica | P50425.1 |
| 286 | Kappa casein | Bos indicus × Bos taurus | AAF72096.1 |
| 287 | | | AAF72098.1 |
| 288 | Kappa casein (precursor) | Capra hircus | NP_001272516.1 |
| 289 | | | AYN74373.1 |
| 290 | | | QIZ03345.1 |
| 291 | | | QIZ03342.1 |
| 292 | | | AFZ92921.1 |
| 293 | | | AAR06605.1 |
| 294 | | | AAM12026.1 |
| 295 | | | AAL93193.1 |
| 296 | | | AAR91623.1 |
| 297 | | | AFZ92917.1 |
| 298 | | | AAM12027.1 |
| 299 | | | AAL90873.1 |
| 300 | | | AFZ92918.1 |
| 301 | | | AAL90871.1 |
| 302 | | | AAL90872.1 |
| 303 | | | AAL31535.1 |
| 304 | | | AAL31534.1 |
| 305 | | | ABK59545.1 |
| 306 | | | AAO39432.1 |
| 307 | | | AFZ92919.1 |
| 308 | | | AAK17010.1 |
| 309 | | | AAO39431.1 |
| 310 | | | AAP80475.1 |
| 311 | Kappa casein | Odocoileus virginianus texanus | XP_020729185.1 |
| 312 | Kappa casein (precursor) | Rupicapra rupicapra | P50424.1 |
| 313 | Kappa casein (precursor) | Ovis aries | NP_001009378.1 |
| 314 | | | AAP69943.1 |
| 315 | Kappa casein (precursor) | Cervus nippon | P42157.1 |
| 316 | Kappa casein | Gazella arabica | AFY03576.1 |
| 317 | Kappa casein | Muntiacus muntjak | KAB0341224.1 |
| | (hypothetical protein | | |
| | FD754_018150) | | |
| 318 | Kappa casein | Muntiacus reevesi | KAB0354473.1 |
| | (hypothetical protein | | |
| | FD755_023011) | | |
| 319 | Kappa casein | Gazella dorcas | AFY03575.1 |
| 320 | Kappa casein | Procapra gutturosa | AFY03581.1 |
| 321 | | | AFY03580.1 |
| 322 | Kappa casein | Madoqua saltiana | AFY03578.1 |
| 323 | Kappa casein | Ammotragus lervia | QIN85723.1 |
| 324 | | | QIN85720.1 |
| 325 | | | QIN85721.1 |
| 326 | Kappa casein | Capra sibirica | AAP80568.1 |
| 327 | Kappa casein | Ovis canadensis canadensis | ADB66397.1 |
| 328 | | | ADB66402.1 |
| 329 | Kappa casein | Gazella subgutturosa marica | AFY03577.1 |
| 330 | Kappa casein | Antilope cervicapra | AFY03573.1 |
| 331 | Kappa casein | Capra ibex ibex | AAP80529.1 |
| 332 | Kappa casein | Ovis vignei arkal | ADB66436.1 |
| 333 | | | ADB66442.1 |
| 334 | Kappa casein | Ovis ammon collium | ADB66395.1 |
| 335 | Kappa casein | Ovis vignei blanfordi | ADB66445.1 |
| 336 | Kappa casein | Ovis orientalis gmelini | ADB66423.1 |
| 337 | | | ADB66420.1 |
| 338 | Kappa casein | Ovis orientalis × vignei | ADB66465.1 |
| 339 | Kappa casein | Ovis vignei vignei | ADB66456.1 |
| 340 | Kappa casein | Ovis ammon severtzovi | ADB66396.1 |

Alpha S1 casein sequences

| | | | |
|---|---|---|---|
| 7 | Optimized alpha S1- | Artificial (codon optimized | |
| | casein truncated version | Bos taurus) | |
| | 1(OaS1-T) | | |
| 8 | Optimized alpha S1- | Bos taurus | |
| | casein truncated version | | |
| | 1(OaS1-T) | | |
| 99 | Alpha S1 casein | Capra hircus | |
| 100 | Alpha S1 casein | Ovis aries | |
| 101 | Alpha S1 casein | Bubalus bubalis | |
| 102 | Alpha S1 casein | Camelus dromedaries | |
| 103 | Alpha S1 casein | Camelus bactrianus | |
| 104 | Alpha S1 casein | Bos mutus | |
| 105 | Alpha S1 casein | Equus caballus | |
| 106 | Alpha S1 casein | Equus asinus | |
| 107 | Alpha S1 casein | Bos indicus | |
| 108 | Alpha S1 casein | Lama glama | |
| 109 | Alpha S1 casein | Homo sapiens | |
| 341 | Alpha S1 casein | Bos taurus | ABW98943.1 |
| 342 | | | XP_024848771.1 |
| 343 | | | ABW98940.1 |
| 344 | | | ACG63494.1 |
| 345 | | | XP_015327132.1 |
| 346 | | | XP_024848772.1 |
| 347 | | | 1308122A |
| 348 | | | ABW98949.1 |
| 349 | | | AAA30429.1 |
| 350 | | | XP_015327135.1 |
| 351 | | | XP_015327134.1 |
| 352 | | | XP_024848773.1 |
| 353 | | | XP_015327133.1 |
| 354 | | | XP_024848774.1 |
| 355 | | | XP_015327136.1 |
| 356 | | | XP_024848775.1 |
| 357 | | | XP_005208084.1 |
| 358 | | | XP_024848776.1 |
| 359 | | | XP_015327137.1 |
| 360 | | | XP_015327138.1 |
| 361 | | | XP_024848777.1 |
| 362 | | | XP_024848778.1 |
| 363 | | | XP_015327139.1 |
| 364 | | | ABW98944.1 |
| 365 | | | XP_015327140.1 |
| 366 | | | XP_024848779.1 |
| 367 | | | XP_015327141.1 |
| 368 | | | XP_024848780.1 |
| 369 | | | XP_015327142.1 |
| 370 | | | ABW98945.1 |
| 371 | | | XP_024848782.1 |
| 372 | | | ABW98951.1 |
| 373 | | | XP_024848784.1 |
| 374 | | | XP_024848783.1 |
| 375 | | | ABW98950.1 |
| 376 | | | ABW98941.1 |
| 377 | | | XP_005208086.1 |
| 378 | | | ABW98942.1 |
| 379 | | | ABW98937.1 |
| 380 | | | ABW98952.1 |
| 381 | | | ABW98954.1 |
| 382 | | | ABW98953.1 |
| 383 | | | ABW98955.1 |
| 384 | | | ABW98957.1 |
| 385 | Alpha S1 casein | Capra hircus | XP_017904616.1 |
| 386 | | | QIZ03312.1 |
| 387 | | | ALJ30147.1 |
| 388 | | | P18626.2 |
| 389 | | | XP_017904617.1 |
| 390 | | | AFN44013.1 |
| 391 | | | QIZ03319.1 |
| 392 | | | CAA51022.1 |
| 393 | | | NP_001272624.1 |
| 394 | | | ALJ30148.1 |
| 395 | | | QIZ03317.1 |
| 396 | | | QIZ03310.1 |
| 397 | | | QIZ03318.1 |
| 398 | | | XP_017904618.1 |
| 399 | | | XP_017904620.1 |
| 400 | | | XP_017904619.1 |
| 401 | | | XP_017904621.1 |
| 402 | | | XP_017904622.1 |
| 403 | Alpha S1 casein | Ovis aries | XP_012034747.1 |
| 404 | | | P04653.3 |
| 405 | | | AAB34797.1 |
| 406 | | | ACJ46472.1 |
| 407 | | | XP_027826521.1 |
| 408 | | | XP_027826520.1 |
| 409 | | | ACR58469.1 |
| 410 | | | ACJ46473.1 |
| 411 | | | AAB34798.1 |
| 412 | | | NP_001009795.1 |
| 413 | Alpha S1 casein | Bubalus bubalis | AAZ14098.1 |
| 414 | | | APQ30583.1 |
| 415 | | | 062823.2 |
| 416 | | | XP_006071187.1 |
| 417 | | | QCP57314.1 |
| 418 | | | XP_025145744.1 |
| 419 | | | QPO15022.1 |
| 420 | | | XP_025145745.1 |
| 421 | | | ACJ14317.1 |
| 422 | | | XP_006071188.1 |
| 423 | | | XP_025145747.1 |
| 424 | | | XP_025145746.1 |
| 425 | | | XP_025145748.1 |
| 426 | | | XP_025145749.1 |
| 427 | | | XP_025145750.1 |
| 428 | | | XP_025145751.1 |
| 429 | | | XP_025145752.1 |
| 430 | | | XP_025145753.1 |
| 431 | Alpha S1 casein | Bos mutus | XP_005902100.1 |
| 432 | Alpha S1 casein | Bos indicus | XP_019818428.1 |
| 433 | Alpha S1 casein | Jeotgalicoccus coquinae | WP_188357546.1 |
| 434 | (hypothetical protein) | | GGE26809.1 |
| 435 | Alpha S1 casein | Bison bison bison | XP_010850445.1 |
| 436 | Alpha S1 casein | Bos grunniens | AXE74293.1 |
| 437 | Alpha S1 casein | Jeotgalicoccus aerolatus | WP_188349304.1 |
| 438 | (hypothetical protein) | | WP_188352531.1 |
| 439 | Alpha S1 casein | Muntiacus muntjak | KAB0341228.1 |
| | (hypothetical protein | | |
| | FD754_018154) | | |
| 440 | Alpha S1 casein | Muntiacus reevesi | KAB0354470.1 |
| | (hypothetical protein | | |
| | FD755_023008) | | |

Alpha S2 casein sequences

| | | | |
|---|---|---|---|
| 83 | Optimized alpha S2- | Artificial (codon optimized | |
| | casein truncated version | Bos taurus) | |
| | 1(OaS2-T) | | |
| 84 | Optimized alpha S2- | Bos taurus | |
| | casein truncated version | | |
| | 1(OaS2-T) | | |
| 110 | Alpha S2 casein | Capra hircus | |
| 111 | Alpha S2 casein | Ovis aries | |
| 112 | Alpha S2 casein | Bubalus bubalis | |
| 113 | Alpha S2 casein | Camelus dromedaries | |
| 114 | Alpha S2 casein | Camelus bactrianus | |
| 115 | Alpha S2 casein | Bos mutus | |
| 116 | Alpha S2 casein | Equus caballus | |
| 117 | Alpha S2 casein | Equus asinus | |
| 118 | Alpha S2 casein | Vicugna pacos | |
| 119 | Alpha S2 casein | Bos indicus | |
| 120 | Alpha S2 casein | Lama glama | |
| 441 | Alpha S2 casein | Bos taurus | AAI14774.1 |
| 442 | | | XP_024848786.1 |
| 443 | | | XP_015327143.1 |
| 444 | Alpha S2 casein | Capra hircus | QIS93310.1 |
| 445 | | | NP_001272514.1 |
| 446 | | | CAB94236.1 |
| 447 | | | QIS93322.1 |
| 448 | | | AAB32166.1 |
| 449 | | | QIS93306.1 |
| 450 | | | XP_013820127.2 |
| 451 | | | QIS93323.1 |
| 452 | | | QIZ03322.1 |
| 453 | | | QIS93316.1 |
| 454 | | | CAB59920.1 |
| 455 | | | CAC21704.2 |
| 456 | | | QIS93307.1 |
| 457 | | | XP_013820130.2 |
| 458 | | | QIS93319.1 |
| 459 | | | QIS93321.1 |
| 460 | | | XP_013820128.2 |
| 46 | | | QIS93304.1 |
| 462 | | | XP_013820129.2 |
| 463 | | | QIS93305.1 |
| 464 | | | QIS93314.1 |
| 465 | | | QIS93317.1 |
| 466 | | | XP_013820132.2 |
| 467 | | | XP_013820131.2 |
| 468 | Alpha S2 casein | Ovis aries | ADB65931.1 |
| 469 | | | NP_001009363.1 |
| 470 | | | ADB65933.1 |
| 471 | | | ADB65935.1 |
| 472 | | | ADB65934.1 |
| 473 | | | ADB65932.1 |
| 474 | Alpha S2 casein | Bubalus bubalis | NP_001277794.1 |
| 475 | | | AAZ80050.1 |
| 476 | | | CAA06534.2 |
| 477 | | | AFB69498.1 |
| 478 | | | XP_006071185.2 |
| 479 | | | AAZ57423.1 |
| 480 | | | APQ30584.1 |
| 481 | | | XP_025145302.1 |
| 482 | | | XP_025145301.1 |
| 483 | Alpha S2 casein | Bos mutus | XP_014335716.1 |
| 484 | | | ELR51813.1 |
| 485 | Alpha S2 casein | Jeotgalicoccus aerolatus | WP_188352530.1 |
| 486 | (hypothetical protein) | | GGE08804.1 |
| 487 | Alpha S2 casein | Jeotgalicoccus coquinae | WP_188357545.1 |
| | (hypothetical protein) | | |
| 488 | Alpha S2 casein | Bos grunniens | AXE74294.1 |
| 489 | Alpha S2 casein | Bison bison bison | XP_010850447.1 |
| 490 | Alpha S2 casein | Bos indicus × Bos taurus | XP_027401112.1 |
| 491 | Alpha S2 casein | Odocoileus virginianus texanus | XP_020729187.1 |
| 492 | Alpha S2 casein | Muntiacus muntjak | KAB0341229.1 |
| | (hypothetical protein | | |
| | FD754_018155) | | |
| 493 | Alpha S2 casein | Muntiacus reevesi | KAB0354254.1 |
| | (hypothetical protein | | |
| | FD755_022792) | | |
| 494 | Alpha S2 casein | Cervus elaphus | OWK13818.1 |
| | (CSN1S2) | hippelaphus | |

Beta-casein sequences

| | | | |
|---|---|---|---|
| 5 | Optimized beta-casein | Artificial (codon optimized | |
| | truncated version 2 | Bos taurus) | |
| | (OBC-T2) | | |
| 6 | Optimized beta-casein | Bos taurus | |
| | truncated version 2 | | |
| | (OBC-T2) | | |
| 121 | Beta casein | Capra hircus | |
| 122 | Beta casein | Ovis aries | |
| 123 | Beta casein | Bubalus bubalis | |
| 124 | Beta casein | Camelus dromedaries | |
| 125 | Beta casein | Camelus bactrianus | |
| 126 | Beta casein | Bos mutus | |
| 127 | Beta casein | Equus caballus | |
| 128 | Beta casein | Equus asinus | |
| 129 | Beta casein | Alces alces | |
| 130 | Beta casein | Vicugna pacos | |
| 131 | Beta casein | Bos indicus | |
| 132 | Beta casein | Lama glama | |
| 133 | Beta casein | Homo sapiens | |
| 495 | Beta casein | Bos taurus | AAB29137.1 |
| 496 | | | AAA30431.1 |
| 497 | | | 1314242A |
| 498 | | | AGT56763.1 |
| 499 | | | AAI11173.1 |
| 500 | | | XP_010804480.2 |
| 501 | | | AAA30430.1 |
| 502 | | | XP_015327157.2 |
| 503 | | | ABR10906.1 |
| 504 | | | ABL74247.1 |
| 505 | | | QCI03091.1 |
| 506 | | | QCI03090.1 |
| 507 | | | CAC37028.1 |
| 508 | Beta casein | Capra hircus | P33048.1 |
| 509 | | | QIZ03333.1 |
| 510 | | | CAB39200.1 |
| 511 | | | AAK97639.1 |
| 512 | | | XP_005681778.2 |
| 513 | | | QLI42602.1 |
| 514 | | | XP_013820153.1 |
| 515 | | | QLI42606.1 |
| 516 | | | QHN12643.1 |
| 517 | | | ABQ52487.1 |
| 518 | | | QHN12642.1 |
| 519 | | | CAB39313.1 |
| 520 | | | QHN12644.1 |
| 521 | | | AWN06750.1 |
| 522 | Beta casein | Ovis aries | P11839.3 |
| 523 | | | NP_001009373.1 |
| 524 | Beta casein | Bubalus bubalis | QHB80269.1 |
| 525 | | | APQ30585.1 |
| 526 | | | QHB80272.1 |
| 527 | | | QHB80273.1 |
| 528 | | | NP_001277808.1 |
| 529 | | | Q9TSI0.1 |
| 530 | | | XP_006071186.1 |
| 531 | | | CAA06535.1 |
| 532 | | | 1004269A |
| 533 | | | ADD31643.1 |
| 534 | | | ADD31644.1 |
| 535 | | | AAT09469.1 |
| 536 | | | ABL10285.1 |
| 537 | | | ABA41625.1 |
| 538 | | | ABA41623.1 |
| 539 | Beta casein | Bos mutus | MXQ92033.1 |
| 540 | | | XP_014335713.1 |
| 541 | | | XP_005902099.2 |
| 542 | | | XP_014335715.1 |
| 543 | | | XP_014335714.1 |
| 544 | Beta casein | Bos indicus | AQY78354.1 |
| 545 | | | AQY78355.1 |
| 546 | | | ABL75279.1 |
| 547 | | | ABY27644.1 |
| 548 | | | AWN06759.1 |
| 549 | | | AGZ84117.1 |
| 550 | Beta casein | Bison bison bison | XP_010850446.1 |
| 551 | Beta casein (hypothetical | Jeotgalicoccus aerolatus | WP_188352529.1 |
| | protein) | | |
| 552 | Beta casein (hypothetical | Jeotgalicoccus coquinae | WP_188357544.1 |
| | protein) | | |
| 553 | Beta casein (precursor) | Bos indicus × Bos taurus | ARU83745.1 |
| 554 | | | AWN06757.1 |
| 555 | | | AWN06758.1 |
| 556 | Beta casein | Bos grunniens | AXE74295.1 |
| 557 | | | AEY63644.1 |
| 558 | | | AEY63645.1 |
| 559 | | | AEC13563.1 |
| 560 | Beta casein | Neophocaena asiaeorientalis | XP_024597374.1 |
| | | asiaeorientalis | |
| 561 | Beta casein | Odocoileus virginianus texanus | XP_020729180.1 |
| 562 | Beta casein (hypothetical | Muntiacus reevesi | KAB0354325.1 |
| | protein FD755_022863) | | |
| 563 | Beta casein (hypothetical | Muntiacus muntjak | KAB0345505.1 |
| | protein FD754_022431) | | |

Beta-Lactoglobulin sequences

| | | | |
|---|---|---|---|
| 9 | Optimized Beta | Artificial (codon optimized | |
| | Lactoglobulin 1 (OLG1) | Bos taurus) | |
| 10 | Optimized Beta | Bos taurus | |
| | Lactoglobulin 1 (OLG1) | | |
| 11 | Optimized Beta | Artificial (codon optimized | |
| | Lactoglobulin 2 (OLG2) | Bos taurus) | |
| 12 | Optimized Beta | Artificial (codon optimized | |
| | Lactoglobulin 3 (OLG3) | Bos taurus) | |
| 13 | Optimized Beta | Artificial (codon optimized | |
| | Lactoglobulin 4 (OLG4) | Bos taurus) | |
| 564 | Beta Lactoglobulin | Bos taurus | 5K06_A |
| 565 | | | 1B0O_A |
| 566 | | | NP_776354.2 |
| 567 | | | 3PH5_A |
| 568 | | | 1BEB_A |
| 569 | | | 6QPD_A |
| 570 | | | 6Q17_A |
| 571 | | | DAA24277.1 |
| 572 | | | 5HTD_A |
| 573 | | | 6QPE_A |
| 574 | | | 6RWR_A |
| 575 | | | 1BSO_A |
| 576 | | | 6RWQ_A |
| 577 | | | ACG59280.1 |
| 578 | | | 5NUJ_A |
| 579 | | | 5NUM_A |
| 580 | | | 1UZ2_X |
| 581 | | | CAA32835.1 |
| 582 | | | 1CJ5_A |
| 583 | | | 5NUK_A |
| 584 | | | 5NUN_A |
| 585 | | | 732164A |
| 586 | | | XP_024854027.1 |
| 587 | | | AAA30411.1 |
| 588 | Beta Lactoglobulin | Capra hircus | 40MW_A |
| 589 | | | NP_001272468.1 |
| 590 | | | ABQ51182.1 |
| 591 | Beta Lactoglobulin | Ovis aries | 4NLI_A |
| 592 | | | NP_001009366.1 |
| 593 | | | 4CK4_A |
| 594 | | | 4CK4_B |
| 595 | Beta Lactoglobulin | Bubalus bubalis | 0601265A |
| 596 | | | P02755.2 |
| 597 | | | NP_001277893.1 |
| 598 | | | QOQ34530.1 |
| 599 | | | APQ30587.1 |
| 600 | | | ABG78270.1 |
| 601 | Beta Lactoglobulin | Bos mutus | XP_005888577.1 |
| 602 | | | MXQ94840.1 |
| 603 | Beta Lactoglobulin | Bos indicus | XP_019826641.1 |
| 604 | Beta Lactoglobulin | Jeotgalicoccus coquinae | WP_188357550.1 |
| | (lipocalin/fatty-acid | | |
| | binding family protein) | | |
| 605 | Beta Lactoglobulin | Jeotgalicoccus schoeneichii | WP_188349305.1 |
| | (lipocalin/fatty-acid | | |
| | binding family protei | | |
| 606 | Beta Lactoglobulin | Bison bison bison | XP_010855058.1 |
| 607 | Beta Lactoglobulin | Ovis sp. | AAA31510.1 |
| 608 | Beta Lactoglobulin | Ovis aries musimon | P67975.1 |
| 609 | Beta Lactoglobulin | Odocoileus virginianus texanus | XP_020744123.1 |
| 610 | Beta Lactoglobulin, | Rangifer tarandus | 1YUP_A |
| | Chain A | | |
| 611 | Beta Lactoglobulin | Rangifer tarandus tarandus | AAZ57420.1 |
| 612 | Beta Lactoglobulin | Muntiacus muntjak | KAB0364864.1 |
| | (hypothetical protein | | |
| | FD754_009020) | | |
| 613 | Beta Lactoglobulin | Muntiacus reevesi | KAB0379658.1 |
| | (hypothetical protein | | |
| | FD755_007442) | | |
| 614 | Beta Lactoglobulin, | Equus caballus | 3KZA_A |
| | Chain A | | |

TABLE 91
Additional Exemplary Glycotags

| | | | | No. of | | | | | |
|---|---|---|---|---|---|---|---|---|---|
| | | | | Hyp- | | | | | |
| | | | | containing | | | | | |
| | | | | peptide | 1KP groups with | | | | |
| | | | | hits in | Hyp-containing | | | | |
| 1KP group | | Glyco- | Hyp containing | 1KP | peptide hits | Example 1KP sequences with | 1KP | | Reference |
| and species | Protein | sylationa | motifsb,c | MAABd | in 1KP MAAB | peptide matches (MAAB Class)e | group | Species | sf |
| Green algae | AGP | | | | | | | | |
| Volvox | Chimeric | Ara: | IYPSVGSSSIVTPSW | | | | | | Godl et |
| carteri | AGP | Gal 1:1g | TAIGGSTLPLPLONA | | | | | | al. |
| | (Pherophorin) | | OOSOLO (SEQ ID | | | | | | 1997 |
| | | | NO: 957) | | | | | | |
| Moss | AGP | | | | | | | | |
| Physco- | P. patens | AG | XVOOOAGSOFQOVO | | | >YEPO Locus_1020 | Moss | Physco- | Lee et |
| mitrela | AGP2 | (Yariv) | S (SEQ ID | | | (Class 1, GPI-AGP)j | | mitrium | al. |
| patens | | | NO: 958) | | | MASSNTMSVAAALCLVTLFASVIVQVAAQEP | | sp. | 2005 |
| | | | | | | ASAPTA | | | |
| | | | | | | TPPVGAPTVPPPAGSPFQPPTSSPPAASGPA | | | |
| | | | | | | SVPPPPSPS | | | |
| | | | | | | AETPTATDSPPAAEGPGPATTPSSDAFTVAP | | | |
| | | | | | | TVSIVLMST | | | |
| | | | | | | LAYLLY (SEQ ID NO: 959) | | | |
| Physco- | P. patens | AG | SAGOVMAVVOOVTOO | | | | | | |
| mitrela | AGP | (Yariv) | VTOSV (SEQ ID | | | | | | |
| | | | NO: 960) | | | | | | |
| patens | | | SOASSAGOOMGSOOS | | | | | | |
| | | | OAOA (SEQ ID | | | | | | |
| | | | NO: 961) | | | | | | |
| | | | SOLTKAEVFYELKDL | | | | | | |
| | | | KGY (SEQ ID | | | | | | |
| | | | NO: 962) | | | | | | |
| Conifers | AGP | | | | | | | | |
| Pinus taeda | Classical | AG | ASEAOLSSAQAOKSA | 1 | Conifers | >MFTM_Locus_6686 | Conifers | Pinus | Loopstra |
| | AGP, | (Yariv) | LRHRA (SEQ ID | | | (Class 4, non-GPI-AGP) | | jeffreyi | et |
| | PtaAGP3 | | NO: 963) | | | METSTRSAVLLSLIAAAMMIHCCLADHQQYK | | | al. 2000 |
| | | | | | | VDESHE | | | |
| | | | | | | QWGFLTNNKAWSYILASEAPLSSAQAPKSAL | | | |
| | | | | | | RHRAKAS | | | |
| | | | | | | SAPVASSPSVSPSPTAAEAVPSASSTSESPA | | | |
| | | | | | | SSPATPPAQN | | | |
| | | | | | | GSPS (SEQ ID NO: 964) | | | |
| | Extensin | | | | | | | | |
| Pseudotsuga | Classical | Arah | KSOOOOXY (SEQ | 1450 | Monocots, | >AREG_Locus_407 | Conifers | Notho- | Fong et |
| | | | ID NO: 965) | | Cycadales, | (Class 2, CL-EXT) | | tsuga | al. |
| menziesii | extensin, | | LSOOOOYPAOAOYY | | Leptosporangiate | MALLAGMSFIRNLLLVLIVGCIYAANPSAAS | | longi- | 1992 |
| | SP2 | | (SEQ ID NO: 966) | | Monilophytes, | YYKSPPPK | | bracteata | |
| | | | AVOVSOOY (SEQ | 74 | Asterids, | PYPYKSPPPPSHVPSPVHYKPPPAPTPVPKP | | | |
| | | | ID NO: 967) | | Conifers, | PVVEKPPPK | | | |
| | | | ALPXYATVSXPXYPXG | | Lycophytes, | AVPISPPYKYKSPPPPKPIPAPYAKPPP | | | |
| | | | (SEQ ID NO: 968) | | Commelinids, | VHKPLPPPSPPKS | | | |
| | | | ASOOAXT (SEQ | | Rosids, | WPSPLPPHHKPSPVTKPPKATPSPPEKPYGY | | | |
| | | | ID NO: 969) | | Mosses, | KSPPPPAHV | | | |
| | | | KPOOAOTOVV (SEQ | 308 | Hornworts, | VSPAPPKAVTAFPPPHPKPPVYPSPPTHHYF | | | |
| | | | ID NO: 970) | | Core Eudicots, | YKSPPP | | | |
| | | | KSOOOTHT (SEQ | | Basal | PPY (SEQ ID NO: 972) | | | |
| | | | ID NO: 971) | | Eudicots, | | | | |
| | | | | | Magnoliids, | | | | |
| | | | | | Chloranthales, | | | | |
| | | | | | Eusporangiate | | | | |
| | | | | | Monilophytes, | | | | |
| | | | | | Basalmost | | | | |
| | | | | | angiosperms, | | | | |
| | | | | | Liverworts, | | | | |
| | | | | | Chromista | | | | |
| | | | | | Conifers, | | | | |
| | | | | | Liverworts | | | | |
| | | | | | Monocots, Core | | | | |
| | | | | | Eudicots, | | | | |
| | | | | | Asterids, | | | | |
| | | | | | Mosses, | | | | |
| | | | | | Conifers, | | | | |
| | | | | | Leptosporangiate | | | | |
| | | | | | Monilophytes, | | | | |
| | | | | | Basal | | | | |
| | | | | | Eudicots, | | | | |
| | | | | | Basalmost | | | | |
| | | | | | angiosperms, | | | | |
| | | | | | Chromista, | | | | |
| | | | | | Rosids, | | | | |
| | | | | | Commelinids, | | | | |
| | | | | | Lycophytes, | | | | |
| | | | | | Liverworts, | | | | |
| | | | | | Magnoliids, | | | | |
| | | | | | Green Algae, | | | | |
| | | | | | Gnetales, | | | | |
| | | | | | Cycadales | | | | |
| | Other | | | | | | | | |
| Pseudotsuga | Hybrid | Arah | KPOVOVIPPOVVKPO | | | | | | Kiel- |
| menziesii | HRGP, | | OVYKPOVOVIPP | | | | | | iszewski |
| | | | (SEQ ID NO: 973) | | | | | | et al. |
| | PHRGP | | OVVKPOVYKIP[P/O] | | | | | | 1992 |
| | | | VIKP (SEQ ID | | | | | | |
| | | | NO: 974) | | | | | | |
| Monocots/ | | | | | | | | | |
| Commelinids | AGP | | | | | | | | |
| Lollium | AGP | Arah | AEAOAOAOAS | 1 | Conifers | >AWQB Locus 369 | Conifers | Picea | Gleeson |
| multiflorum | | | (SEQ ID NO: 975) | | | (Class 1, GPI-AGP) | | engel- | et al. |
| | | | | | | MGFKCRLYFAILLWLCIQATCCRAHDRVLVR | | mannii | 1989 |
| | | | | | | DRVLPTTKT | | | |
| | | | | | | GIVGVALAAAKNATKSVTPVASPKPSETKPE | | | |
| | | | | | | APTAAPKAP | | | |
| | | | | | | PISKAPPAKAPSVPPPLSSASPPSKAPAKSP | | | |
| | | | | | | PKTPPIPKAP | | | |
| | | | | | | VAAPVSPPPKAGPSKKPPVLAPSKAPSASHG | | | |
| | | | | | | AAPVSSPP | | | |
| | | | | | | APAPPKHKKPTEAPAPAPPKHKKPTEAPAPA | | | |
| | | | | | | PPKHKKPT | | | |
| | | | | | | EAPSPAPSHHKKPAEAPAPAPASSKHKPHVE | | | |
| | | | | | | TPAPAPAK | | | |
| | | | | | | HKRPVEAPTPASEEAPTPAPAPAKHKKKKKK | | | |
| | | | | | | PKHPKKNQ | | | |
| | | | | | | KHHHHHAPAPAPVVSPPAPPLSPEPSTSEDL | | | |
| | | | | | | SVPAPAPD | | | |
| | | | | | | SPNGGMKSFVAGIWRTLVVASILVIFMA | | | |
| | | | | | | (SEQ ID NO: 976) | | | |
| | Other | | | | | | | | |
| Hordeum | AG-Peptide | AGh | QAA[E/V]OSOAAEV | | | | | | Van den |
| vulgare | | | (SEQ ID NO: 977) | | | | | | Bulck et |
| | | | OTGD (SEQ | | | | | | al. 2005 |
| | | | ID NO: 978) | | | | | | |
| Secale | AG-Peptide | AGh | YADVOSOAAEGOAVD | | | | | | Van den |
| cereale | | | (SEQ ID NO: 979) | | | | | | Bulck et |
| | | | | | | | | | al. 2005 |
| Triticum | AG-peptide, | AGh | VOSOAAQAOTA | | | | | | Van den |
| aestivum | GSP-1 | | (SEQ ID NO: 980) | | | | | | Bulck et |
| | | | YAEVOSO[A/H/M]Q | | | | | | al. 2002 |
| | | | AOTAD (SEQ ID | | | | | | |
| | | | NO: 981) | | | | | | |
| Triticum | AG-Peptide | AGh | YAEVOSOA[H/A/M] | | | | | | Van den |
| durum | | | QAOTAD (SEQ ID | | | | | | Bulck et |
| | | | NO: 982) | | | | | | al. 2005 |
| Triticum | AG-Peptide | AGh | YAEVOSOA[A/H/M] | | | | | | Van den |
| spelta | | | QAOTAD (SEQ ID | | | | | | Bulck et |
| | | | NO: 983) | | | | | | al. 2005 |
| Tritico- | AG-Peptide | AGh | YAEVOSOA[A/H/M] | | | | | | Van den |
| secale | | | QAOT[V/A]D | | | | | | Bulck et |
| | | | (SEQ ID NO: 984) | | | | | | al. 2005 |
| | | | VYAEVOSOA[A/H/M] | | | | | | |
| | | | QAOT[V/A]D | | | | | | |
| | | | (SEQ ID NO: 985) | | | | | | |
| Zea mays | Hybrid | Ara, Galh | AOOAHFPSOO (SEQ | 27 | Chromista, | >YQIJ_Locus_4908 | Core | Phacelia | Kieliszews |
| | AGP | | ID NO: 986) | | Conifers, | (Class 2, CL-EXT) | Eudicots | campan- | ki et al. |
| | HHRGP | | NGPKHHOOOSXANXO | | Asterids, | MGSHMASLVIAILVAIVSLSLPSTTSANYKY | Lepto- | ularia | 1992 |
| | | | OOEOOY | | Liverworts, | TSPPPPL | sporan- | Davallia | |
| | | | (SEQ ID NO: 987) | | Core Eudicots | KKYPPPHYIYKSPPPPPPVHKYPPPHHPIHK | giate | fejeensis | |
| | | | SOOAHH (SEQ ID | | Asterids, | SPPAHHPVYKSPPPPPHHKKPYKYKSPPPPP | Monilo- | | |
| | | | NO: 988) | 224 | Mosses, | PPVHKYPPTPHHPI | phytes | | |
| | | | NOOOOAHY (SEQ | | Rosids, Green | YKSPPPPTPHKKPYKYKSPPPPPPVYKSPPP | | | |
| | | | ID NO: 989) | | Algae, | PPPKKPY | | | |
| | | | HAOOOOFASY (SEQ | | Core Eudicots, | KYKSPPPPVYKSPPRPPPVTSHHHLHHHTKS | | | |
| | | | ID NO: 990) | | Liverworts, | PTSTSLL | | | |
| | | | AOOOOAHHHOOO | | Conifers, | HPLLQSTSLLHHHHQRNPTSTNLHHHQCTSL | | | |
| | | | (SEQ ID NO: 991) | | Basal Eudicots, | LHLHLQYTSHHHLHHHTKS | | | |
| | | | NAOOOAAHY (SEQ | | Monocots, | (SEQ ID NO: 1008) | | | |
| | | | ID NO: 992) | | Hornworts, | >OQWW_Locus_38562 | | | |
| | | | AOOOYFPTO (SEQ | | Cycadales, Red | (Class 4, non-GPI-AGP) | | | |
| | | | ID NO: 993) | | Algae, | MAALQTLAGLSLLLLVIASSLLPCSQAYWPP | | | |
| | | | AOOAPAP (SEQ ID | 4 | Lycophytes, | TPPPYSSQPPSPSYHKPPPAPLPSTPPPVYT | | | |
| | | | NO: 994) | | Leptosporangiate | PSPPIYTLPPSPPVQPPPVVWAPPPHFYKPP | | | |
| | | | SOOOHSOSOGHY | | Monilophytes, | APYAKPPVPCPPPS | | | |
| | | | (SEQ ID NO: 995) | | Commelinids, | (SEQ ID NO: 1009) | | | |
| | | | ASOOYFPOHGAY | | Euglenozoa | | | | |
| | | | (SEQ ID NO: 996) | | Leptosporangiate | | | | |
| | | | AOOOHFPSOOAANAN | | Monilophytes, | | | | |
| | | | AAOOOAHY | | Green | | | | |
| | | | (SEQ ID NO: 997) | | Algae, Red Algae | | | | |
| | | | AOOOHFPSOOOHHHO | | | | | | |
| | | | OOYA (SEQ | | | | | | |
| | | | ID NO: 998) | | | | | | |
| | | | AAOOOHFPSOO | | | | | | |
| | | | (SEQ ID NO: 999) | | | | | | |
| | | | NAAOOXAAYY | | | | | | |
| | | | (SEQ ID | | | | | | |
| | | | NO: 1000) | | | | | | |
| | | | HVOSOSENGPK | | | | | | |
| | | | (SEQ ID | | | | | | |
| | | | NO: 1001) | | | | | | |
| | | | HHOOSXAEXOOOEO | | | | | | |
| | | | OY (SEQ ID | | | | | | |
| | | | NO: 1002) | | | | | | |
| | | | SOOGGTXAPNXOI | | | | | | |
| | | | (SEQ ID NO: | | | | | | |
| | | | 1003) | | | | | | |
| | | | AOOOHF (SEQ ID | | | | | | |
| | | | NO: 1004) | | | | | | |
| | | | AOOAHFPSOO[T/A] | | | | | | |
| | | | F (SEQ ID NO: | | | | | | |
| | | | 1005) | | | | | | |
| | | | HHOOOSOAEXOOOEO | | | | | | |
| | | | OEXAOOO | | | | | | |
| | | | EFP (SEQ ID | | | | | | |
| | | | NO: 1006) | | | | | | |
| | | | HAOOOOAAHAOOOXF | | | | | | |
| | | | PSOOOAX | | | | | | |
| | | | XF (SEQ ID | | | | | | |
| | | | NO: 1007) | | | | | | |
| Zea mays | Hybrid | nd | TOTOVSHTOSOOOOY | 2 | Commelinids | >YPIC_Locus_4010 | Monocots/ | Micro- | Kieliszews |
| | | | (SEQ ID | | | (Class 4, non-GPI-AGP) | Comme- | stegium | ki et al. |
| | HRGP, | | NO: 1010) | | | MMMGGKKAAALLLALVALSLAVEIQADDTT | linids | vimineum | 1990 |
| | THRGP | | TOSOYPTOOTY (SEQ | | | GYGYGGGGYTPTPEKPPNKGPKPEKPPKEHG | | | |
| | | | ID NO: 1011) | | | HKHPKEHKPPTYTPTPKPTPPTYTPKPPTYP | | | |
| | | | TOSOKPOTOKPP | | | PPTYTPTPKPPATKPPTYPTPKPTPYTPTPK | | | |
| | | | (SEQ ID NO: | | | PPTYETPKPTPPRTTRSRSRRLPSLRHTRHP | | | |
| | | | 1012) | | | SRP (SEQ ID NO: 1017) | | | |
| | | | TOSOKPOTPKPTOO | | | | | | |
| | | | TY (SEQ ID | | | | | | |
| | | | NO: 1013) | | | | | | |
| | | | TOTOKPOATKPPTY | | | | | | |
| | | | (SEQ ID NO: | | | | | | |
| | | | 1014) | | | | | | |
| | | | TOSOKPOTHPTP | | | | | | |
| | | | (SEQ ID NO: | | | | | | |
| | | | 1015) | | | | | | |
| | | | PTOOTYTOSOKPOTP | | | | | | |
| | | | K (SEQ ID | | | | | | |
| | | | NO: 1016) | | | | | | |
| Eudicots | AGP | | | | | | | | |
| Arabidopsis | Classical | AG | AOAOAOTTVTPOOTA | | | | | | Schultz |
| thaliana | AGP, | (Yariv) | (SEQ ID | | | | | | et al. |
| | AtAGP2 | | NO: 1018) | | | | | | 2000 |
| Arabidopsis | Classical | AG | AOAOTOTATOOOATO | | | | | | Schultz |
| thaliana | AGP. | (Yariv) | OOV (SEQ | | | | | | et al. |
| | AtAGP4 | | ID NO: 1019) | | | | | | 2000 |
| Arabidopsis | Classical | AG | EILTKSSOAOSODLA | | | | | | Tan et al. |
| thaliana | AGP. | (Yariv) | DSPLI (SEQ | | | | | | 2013 |
| | AtAGP57 | | ID NO: 1020) | | | | | | |
| Daucus | DcAGP | | DEAOAOAOSOM | 1008 | Asterids, | >AUIP_Locus_6715 | Core | Phelline | Jermyn and |
| | | | (SEQ ID NO: | | Monocots, | (Class 1, GPI-AGP) | eudicot | lucida | Guthrie |
| carota | | | 1021) | | Rosids, Green | MARHLVVLALIFVALVGFVSAEGPSSSPAAT | | | 1985; |
| | | | OAOAOAO (SEQ ID | | Algae, | PSAS | | | Showalter |
| | | | NO: 1022) | | Leptosporangiate | PATTPSAAPPKDAATPTAATPAASTPSSSAP | | | 2001; |
| | | | | | Monilophytes, | TAATPDASAAPSTTTDSPASSPDTEEPSSPP | | | |
| | | | | | Basalmost | APASESTDSPLASPPAPTASSPTGDEAPAPA | | | |
| | | | | | angiosperms, | PKSSGAATLKVSAVA | | | |
| | | | | | Basal | GAAVVAGVFLF (SEQ ID NO: 1023) | | | |
| | | | | | Eudicots, | | | | |
| | | | | | Commelinids, | | | | |
| | | | | | Core | | | | |
| | | | | | Eudicots, | | | | |
| | | | | | Liverworts, | | | | |
| | | | | | Eusporangiate | | | | |
| | | | | | Monilophytes, | | | | |
| | | | | | Conifers, | | | | |
| | | | | | Mosses, | | | | |
| | | | | | Lycophytes, Red | | | | |
| | | | | | Algae, | | | | |
| | | | | | Magnoliids, | | | | |
| | | | | | Gnetales, | | | | |
| | | | | | Hornworts, | | | | |
| | | | | | Chromista, | | | | |
| | | | | | Cycadales, | | | | |
| | | | | | Euglenozoa, | | | | |
| | | | | | Chloranthales | | | | |
| Lyco- | Classical | AG | OAAAOTKPK (SEQ | 222 | Asterids, | >DLAI_Locus_3123 | Core | Solanum | Gao et al. |
| | | | ID NO: 1024) | | Rosids | (Class 1, GPI-AGP) | eudicot | lasio- | 1999; Zhao |
| persicum | AGP, | (Yariv) | AOASSOOVQSOOAOA | | Asterids | MDRKFVFLVSILCIVVASVTGQTPAAAPVGA | | phyllum | et al. |
| esculentum | LeAGP1 | | OEVATOOAV (SEQ | | | KAGTTPPAAAPTKPKTPAPATAPASAPPTAV | | | 2002 |
| | | | ID NO: 1025) | | | PVAPVTAPVT | | | |
| | | | TGQTOAAAXVGAKAG | | | APTTPVVAAPVSAPASSPPVKAPASSPPVQS | | | |
| | | | TTOOAAO (SEQ | | | PPAPAPEVATPPAVSTPPAAAPVAAPVASET | | | |
| | | | ID NO: 1026) | | | TPAPAPSKGKVKGKKGKKHNASPAPSPDMMS | | | |
| | | | AOASSOOVQSOOAOA | | | PPAPPSEAPGPSMDSDSAPSPSLNDESGAEK | | | |
| | | | OEVATOO | | | LKMLGSLVAGWAVMSWLLF | | | |
| | | | VST (SEQ | | | (SEQ ID NO: 1029) | | | |
| | | | ID NO: 1027) | | | | | | |
| | | | OOAAAXVAA (SEQ | | | | | | |
| | | | ID NO: 1028) | | | | | | |
| Lyco- | AGP | | SAYISOAOVASOO | | | | | | Zhao et |
| persicum | | | (SEQ ID NO: | | | | | | al. 2002 |
| esculentum | | | 1030) | | | | | | |
| Nicotiana | Classical | AG | LASOOAOOTADTOA | 21 | Asterids | >MKZR Locus_8106 | Core | Nico- | Du et al. |
| alata | AGP, | (Yariv) | (SEQ ID NO: | | Asterids | (Class 1, GPI-AGP) | eudicot | tiana | 1994 |
| | NaAGP1 | | 1031) | | | MAYSRMMFAFIFALVAGSAFAQAPGASPAAT | | sylves | |
| | | | FAOSGGVALPOS | | | PKASPVAPVASPPTAVVTPVSAPSQSPTTAA | | tris | |
| | | | (SEQ ID NO: | | | SPSESPLASPPAPPTADTPAFAPSGGVALPP | | | |
| | | | 1032) | | | SIGAAPAGSPTSSPNAASLNRVAVAGSAVVA | | | |
| | | | VSAOSQSOSTAA | | | IFAASLMF (SEQ ID NO: 1035) | | | |
| | | | (SEQ ID NO: | | | | | | |
| | | | 1033) | | | | | | |
| | | | IGSAOAGSOTSSPN | | | | | | |
| | | | (SEQ ID NO: | | | | | | |
| | | | 1034) | | | | | | |
| Pyrus | Classical | AGh | (Q)AOXAA* (N- | 623 | Rosids, | >QIEH_Locus_8866 | Core | Coton- | Chen et |
| communis | AGP. | (Yariv) | terminal) (SEQ | | Monocots, | (Class 1, GPI-AGP) | eudicot | easter | al. |
| | PcAGP1 | | ID NO: 1036) | | Asterids, Green | MKMGFAGFQVLMVLSLLATSCIAQAPGAAPT | | trans- | 1994 |
| | | | AKSOTATOOTATOOS | | Algae, | AS | | caucas- | |
| | | | AV (SEQ ID | | Monocots/ | PPTATPPTATPPTATPPSAVPVPSPSKTPTV | | icus | |
| | | | NO: 1037) | | Commelinids, | SPTPSPVTAPTPSASPPASTPASTPSAESPS | | | |
| | | | VTAOTOSASOOSSTO | | Basal Eudicots, | SPPAPSGPSPNSPPADALPPSGTSAISRVVI | | | |
| | | | ASTXA (SEQ | | Magnoliids, | AGTALAGVFFAVVLA | | | |
| | | | ID NO: 1038) | | Basalmost | (SEQ ID NO: 1039) | | | |
| | | | | | angiosperms, | | | | |
| | | | | | Lycophytes, Core | | | | |
| | | | | | Eudicots, | | | | |
| | | | | | Liverworts, | | | | |
| | | | | | Conifers, | | | | |
| | | | | | Leptosporangiate | | | | |
| | | | | | Monilophytes, | | | | |
| | | | | | Chromista | | | | |
| | | | | | (Algae), | | | | |
| | | | | | Mosses, | | | | |
| | | | | | Glaucophyta | | | | |
| | | | | | (Algae) | | | | |
| Pyrus | Copurified | AGh | LSOKKSOTAOSOSST | 5 | Rosids | >EAVM_Locus_5196 | Core | Amelan- | Chen et |
| communis | with | (Yariv) | OOT (SEQ ID | | | (Class 1, GPI-AGP) | eudicot | chier | al. 1994 |
| | PcAGP1 | | NO: 1040) | | | MAQFSGVVMVLMASLLLASTGAQSPASSPAK | | can- | |
| | | | LSOKKSOTAOSOSST | | | SPALSPKKSPTAPSPSSTPPTAATPSPSSTS | | adensis | |
| | | | OOTT (SEQ ID | | | PSTSPSTSPVADSPPSPLSSSPSPSPSSVSR | | | |
| | | | NO: 1041) | | | SPSEAPAPANGAVLNR | | | |
| | | | [V/S][P/S]XOVQS | | | LSVSASVAAGIFAAVLVM | | | |
| | | | OASOOOTT (SEQ | | | (SEQ ID NO: 1044) | | | |
| | | | ID NO: 1042) | | | | | | |
| | | | XXOOAAOVXA[O/S] | | | | | | |
| | | | (SEQ ID NO: | | | | | | |
| | | | 1043) | | | | | | |
| Rosa Pauls | AGP | AGh | DAOAOSOV (SEQ | 1 | Rosids | >DZTK_Locus_20515 | Core | Batis | Komalavil |
| Scarlet | | (Yariv) | ID NO: 1045) | | | (Class 4, non-GPI-AGP) | eudicot | maritima | as et al. |
| | | | | | | MARFDFLLVATVLLLINFALAQDSPVSAPSP | | | 1991 |
| | | | | | | VQVPDFEPADSSPALVPASQPETAFSPPSPP | | | |
| | | | | | | PAEAPEISSFSPAKSPEISSPPAPAPVPTAP | | | |
| | | | | | | APPPSEPPVSPSEEPDAPAPSPVTDGEPSEI | | | |
| | | | | | | SDLSADEGSKTEKGMSGGKKFGVAFGVLAGA | | | |
| | | | | | | GLVGLGVFVYRKRQENIKRARYSYA | | | |
| | | | | | | AREFL (SEQ ID NO: 1046) | | | |
| | Extensin | | | | | | | | |
| Arabidopsis | AtExt3 | AG: | NYFYSSOOOOVKHYT | 374 | Asterids, | >IPWB_Locus_2214 | Core | Brassica | Cannon et |
| thaliana | | Ara:NG | OOVK [N- | | Mosses, | (Class 2, CL-EXT) | eudicot | nigra | al. 2008 |
| | | | term] (SEQ ID | 26 | Rosids, Core | MGSPMASLAATLLILALSLGFVSETTANYYY | | | |
| | | | NO: 1047) | | Eudicots, Green | SSPPPPVKHYTPPVYKSPPPPKKDYEYKSPP | | | |
| | | | SOOOOVK (SEQ ID | | Algae, | PPVKHYSPPPVYKSPPPPKKHYEYKSPPPPV | | | |
| | | | NO: 1048) | | Liverworts, | YKSPPPPVYHSPPPPKKHYEYKS | | | |
| | | | HYSOOOVY (SEQ | | Basal Eudicots, | (SEQ ID NO: 1050) | | | |
| | | | ID NO: 1049) | | Leptosporangiate | | | | |
| | | | | | Monilophytes, | | | | |
| | | | | | Commelinids, | | | | |
| | | | | | Monocots, | | | | |
| | | | | | Basalmost | | | | |
| | | | | | angiosperms, | | | | |
| | | | | | Cycadales, | | | | |
| | | | | | Hornworts, | | | | |
| | | | | | Lycophytes, | | | | |
| | | | | | Chromista, | | | | |
| | | | | | Magnoliids, | | | | |
| | | | | | Conifers | | | | |
| | | | | | Rosids, Core | | | | |
| | | | | | Eudicots, | | | | |
| | | | | | Chromista, | | | | |
| | | | | | Green Algae | | | | |
| Beta | Classical | Ara | SOOVHK (SEQ | 78 | Conifers, Core | >FVXD_Locus_2537 | Core | Beta | Li et al. |
| vulgaris | extensin, | | ID NO: 1051) | | Eudicots, | (Class 20, shared bias EXT | eudicot | maritima | 1990 |
| | P1-type | | YPOOTOVYK (SEQ | | Rosids, | (SPn&Y)) | | | |
| | | | ID NO: 1052) | 64 | Asterids, Basal | MGKLGGMASLVATLLVAFVSLSLPAQTIADY | | | |
| | | | SOOOTOSP (SEQ | | Eudicots, Green | TYSSPPPPVHHEMPPKGHYSPLPPTPVYKSP | | | |
| | | | ID NO: 1053) | 16 | Algae | PVHTYPPPSPIYKSPPVHEYPPPTPVYKSPP | | | |
| | | | SOOVHEYPOOT | 24 | Core Eudicots, | VHKYPPPTPVY | | | |
| | | | [X/O]VYK (SEQ | | Asterids | KSPP (SEQ ID NO: 1055) | | | |
| | | | ID NO: 1054) | | Green Algae, | | | | |
| | | | | | Commelinids, | | | | |
| | | | | | Conifers, | | | | |
| | | | | | Asterids, | | | | |
| | | | | | Rosids, | | | | |
| | | | | | Lycophytes | | | | |
| | | | | | Core Eudicots | | | | |
| Lyco- | Classical | Ara | SOOOO[X]TOVYK | 368 | Basal Eudicots, | >ZSNV_Locus_2413 | Basal | Papaver | Smith et |
| persicum | extensin, | | (SEQ ID NO: | | Asterids, Core | (Class 2, CL-EXT) | eudicot | bract- | al. 1984; |
| esculentum | P1-type | | 1056) | | Eudicots, | MANRGFSMASSITLLVVLISLSWPFFAEADG | | eatum | Smith et |
| | | | SOOOOTOVYK (SEQ | | Magnoliids, | YYSYKSPPPPTPVYKYASPPPPVYIYKSPPP | | | al. |
| | | | ID NO: 1057) | | Rosids, | PTPVYKSPPPPTPVYKYKSPPPPTPVYKYKS | | | 1986 |
| | | | SOOOOVKPYHPTOV | | Monocots, | PPPPTPVYK (SEQ ID NO: 1059) | | | |
| | | | YK (SEQ ID | | Conifers, | | | | |
| | | | NO: 1058) | | Commelinids, | | | | |
| | | | | | Basalmost | | | | |
| | | | | | angiosperms | | | | |
| Lyco- | Classical | Ara | SOOOOVYK (SEQ | 514 | Conifers, | >LQJY_Locus_2340 | Core | Solanum | Smith et |
| persicum | extensin, | | ID NO: 1060) | | Leptosporangiate | (Class 2, CL-EXT) | eudicot | xantho- | al. 1984; |
| esculentum | P2-type | | | | Monilophytes, | MAKIAYLLITLLVALVSLSFPSECKENYYYT | | carpum | Smith et |
| | | | | | Lycophytes, | SPPPPIPIYKYKSPPPPVYKYKSPPPPDYKY | | | al. |
| | | | | | Rosids, | KSPPPPVYKYKSPPPPPPVYKYKSPPPPVYK | | | 1986 |
| | | | | | Monocots, | YKSPPPPPPVYKYKSPPPPVYKYKSPPPPPP | | | |
| | | | | | Asterids, | VYKYKSPPPPVYKYKSP | | | |
| | | | | | Hornworts, | PPPPPVYKYKSPPP (SEQ ID NO: 1061) | | | |
| | | | | | Eusporangiate | | | | |
| | | | | | Monilophytes, | | | | |
| | | | | | Magnoliids, | | | | |
| | | | | | Basal Eudicots, | | | | |
| | | | | | Chloranthales, | | | | |
| | | | | | Core | | | | |
| | | | | | Eudicots, | | | | |
| | | | | | Basalmost | | | | |
| | | | | | angiosperms, | | | | |
| | | | | | Liverworts, | | | | |
| | | | | | Green Algae, | | | | |
| | | | | | Commelinids, | | | | |
| | | | | | Mosses, | | | | |
| | | | | | Cycadales | | | | |
| Lyco- | Classical | | SOOOOSOSOOOOYY | 412 | Monocots, Core | >CPOC_Locus_8084 | Core | Convo- | Lamport |
| persicum | extensin, | | YK (SEQ ID | | Eudicots/ | (Class 2, CL-EXT) | eudicot | lvulus | 1977 |
| esculentum | P3-type | | NO: 1062) | | Asterids, | MAAHGGDPGRGRLLPQILVALVVLAAASVVS | | arvensis | |
| | | | | | Conifers, Core | GDPYVYASPPPPTYEYKSPPPPSPSPPPPYE | | | |
| | | | | | Eudicots/Rosids, | YKSPPPPSPSPPPPYEYKSPPPPSPSPPPPY | | | |
| | | | | | Core Eudicots, | YYKSPPPPSPSPPPPYYYKSPPPPSPSPPPP | | | |
| | | | | | Basalmost | YYYKSPPPPSPSPPPPYYYHSPPPPKKSPPP | | | |
| | | | | | angiosperms, | PYYYTSPPPPVKSPPPLYYYQSPPPPKKSPP | | | |
| | | | | | Magnoliids, | PPYYYHSPPPPVKSPPPPYYYNSPPPPKKSP | | | |
| | | | | | Basal | PPPYYYHSPPPPYYYNSPPP (SEQ ID | | | |
| | | | | | Eudicots, | NO: 1063) | | | |
| | | | | | Lycophytes, | | | | |
| | | | | | Liverworts | | | | |
| Lyco- | Classical | Ara | NYQYSOOOOOOK | | | | | | Brown- |
| persicum | extensin | (TLC)i | (SEQ ID NO: | | | | | | leader |
| esculentum | | | 1064) | | | | | | and Dey |
| | | | | | | | | | 1993 |
| Medicago | Classical | Ara | [K/A]SOOOOAOVY | 48 | Lycophytes, | >NIGS Locus_899 | Core | Helio- | Frueauf |
| | | | | | Core Eudicots/ | (Class 2, CL-EXT) | eudicot | tropium | et |
| truncutula | extensin, | | (SEQ ID NO: | 368 | Asterids, | MASPLFAILVALVSLNLLPSQTTANYPYASP | | kar- | al. 2000 |
| | P1-type | | 1065) | | Conifers, Basal | HPPPYHYKSMPPIPKYPPHHHPIYKSPRPLP | | winskyi | |
| | | | K[A/S]OOOOTOVY | | Eudicots, Core | PIHKPPPHHHPVYKSPPPPPSVHKYPPPSPS | | | |
| | | | (SEQ ID NO: | | Eudicots, Core | HKKPYKKSPPPPILVYHSPPPPQVYKSPPLP | | | |
| | | | 1066) | | Eudicots/Rosids, | PPVYKSPPPKKPYKSPPPPTSVYHSPPPPPT | | | |
| | | | | | Magnoliids | KKPYKSPPPPPTPVYHSPPPPPTKKPYKSPP | | | |
| | | | | | Basal Eudicots, | PPTPVYHSPPPPPTKKPYKYKSPPPPTPVYK | | | |
| | | | | | Core | SPPPVYRSPPPPHKKPYKYKSPPPPAPVYHS | | | |
| | | | | | Eudicots, | PPPTPHHKKPYKYKSPPPPPPIYKSPPPPSH | | | |
| | | | | | Asterids, | HYYYSSPPHHY (SEQ ID NO: 1067) | | | |
| | | | | | Magnoliids, | | | | |
| | | | | | Rosids, | | | | |
| | | | | | Monocots, | | | | |
| | | | | | Conifers, | | | | |
| | | | | | Commelinids, | | | | |
| | | | | | Basalmost | | | | |
| | | | | | angiosperms | | | | |
| Medicago | Extensin- | Ara | KSOOOSS (SEQ | 73 | Core Eudicots, | >LQJY_Locus_34577 | Core | Solanum | Frueauf |
| truncutula | like | | ID NO: 1068) | | Commelinids, | (Class 19, shared bias AGP) | eudicot | xantho- | et al. |
| | | | | | Mosses, | MGFTSVKAIVLIQVLALVLDSSSKLSFGEVT | | carpum | 2000 |
| | | | | | Monocots, | EDWSLDNYQDNEVISNFKSSPGRSTPSTPKS | | | |
| | | | | | Conifers, Basal | SPSPSLPLSSTPPPTKSSPSSLLLAKSPPPS | | | |
| | | | | | Eudicots | SSPSPPPTKSPPSPSSSPPIYASSPLAKSPA | | | |
| | | | | | Rosids, | PSPLSPSSSPSPPTKSPPPSLAKSPPPIAKS | | | |
| | | | | | Asterids, | PPPTLAKSPSPSVKSPPSTSSSPLLPTKSPP | | | |
| | | | | | Lycophytes, | PSLVKSSPPTTNYPLPPPVKSS (SEQ ID | | | |
| | | | | | Green Algae, | NO: 1069) | | | |
| | | | | | Leptosporangiate | | | | |
| | | | | | Monilophytes, | | | | |
| | | | | | Magnoliids, | | | | |
| | | | | | Eusporangiate | | | | |
| | | | | | Monilophytes | | | | |
| Medicago | P3-type | Ara | K[A/S]OOOX[A/S] | 1016 | Monocots, | see >CPOC_Locus_8084 | | | Frueauf |
| truncutula | extensin | | OSOOOXY (SEQ | 27 | Leptosporangiate | | | | et al. |
| | | | ID NO: 1070) | | Monilophytes, | | | | 2000 |
| | | | KSOOOOSOSOOOO | | Asterids, | | | | |
| | | | [X/O]Y (SEQ | | Conifers, | | | | |
| | | | ID NO: 1071) | | Rosids, Basal | | | | |
| | | | | | Eudicots, Core | | | | |
| | | | | | Eudicots, | | | | |
| | | | | | Basalmost | | | | |
| | | | | | angiosperms, | | | | |
| | | | | | Magnoliids, | | | | |
| | | | | | Lycophytes, | | | | |
| | | | | | Eusporangiate | | | | |
| | | | | | Monilophytes, | | | | |
| | | | | | Commelinids, | | | | |
| | | | | | Green Algae, | | | | |
| | | | | | Cycadales, | | | | |
| | | | | | Chromista, | | | | |
| | | | | | Liverworts | | | | |
| | | | | | Conifers, | | | | |
| | | | | | Basalmost | | | | |
| | | | | | angiosperms, | | | | |
| | | | | | Rosids, | | | | |
| | | | | | Lycophytes, | | | | |
| | | | | | Monocots, | | | | |
| | | | | | Asterids, | | | | |
| | | | | | Basal Eudicots | | | | |
| Medicago | Extensin | Ara | [H/D]SOOOOVH | 126 | Rosids, Basal | >SXCE Locus_19111 (Class 20, | Core | Physo- | Frueauf |
| truncutula | | | (SEQ ID | | Eudicots, | shared bias EXT (SPn&Y)) | eudicot | carpus | et al. |
| | | | NO: 1072) | | Leptosporangiate | MGNSTALAFMEEKLFPCSLRLKVGLILLAIF | | opuli- | 2000 |
| | | | | | Monilophytes, | AGLTSEEETGLLCISDCTTCPIICSPPPPQP | | folius | |
| | | | | | Monocots, Core | ESSNPPPSPDSPPPPVHHSPAPQYYYTSPPP | | | |
| | | | | | Eudicots, | SPPPPSPPKKSPSPPSSSSTYSSKGSPPAPW | | | |
| | | | | | Asterids, | NYFYNLPPSGPDQVPPTTGVLQHNNSFPYYY | | | |
| | | | | | Green Algae, | FYASEASSLSVH (SEQ ID NO: 1073) | | | |
| | | | | | Magnoliids, | | | | |
| | | | | | Lycophytes, | | | | |
| | | | | | Mosses, | | | | |
| | | | | | Conifers | | | | |
| | PRP | | | | | | | | |
| Glycine max | SbPRP1 | nd | XYEKPOIYKPOVYT | 9 | Rosids, | >ZUQW Locus 37 | Core | Glycine | Lindstrom |
| | | | (SEQ ID NO: | | Asterids, | (Class 18, PRP bias Tyr) | eudicot | soja | and |
| | 35 kDa | | 1074) | | Leptosporangiate | MRNMASLSSSLVLLLAALILSPQVLADYEKP | | | Vodkin |
| | | | | | Monilophytes | PIYKPPVYTPPVYKPPIYKPPVYTPPVYKPP | | | 1991 |
| | | | | | | VEKPPVYKPPVYKPPVEKPPVYKPPVYKPPI | | | |
| | | | | | | YKPPVV (SEQ ID NO: 1075) | | | |
| Glycine max | SbPRP1 | ″not | NYENPOVYKPOTEKP | 6 | Rosids | >PFSA Locus_1393 | Core | Glycine | Kleis-San |
| | | highly | OVY (SEQ | | | (Class 18, PRP bias Tyr) | eudicot | soja | Francisco |
| | | glyco- | ID NO: 1076) | | | MASLSSLVLLLAALILSPQVLANYENPPVYK | | | and |
| | | sylated″ | | | | PPTEKPPVYKPPVEKPPVYKPPVENPPIYKP | | | Tierney |
| | | (Datta | | | | PVEKPPVYKPPVDTASYKPPIYKPPVYKPPV | | | 1990 |
| | | 1989) | | | | EKPPVYKPPV (SEQ ID NO: 1077) | | | |
| Glycine max | RPRP1 | ″not | POVYKPOVYK (SEQ | 59 | Leptosporangiate | see ZUQW_Locus_37 | | | Averyhart- |
| | | glyco- | ID NO: 1078) | | Monilophytes, | | | | Fullard et |
| | | sylated″ | | | Lycophytes, | | | | al. 1988; |
| | | | | | Rosids, | | | | Datta et |
| | | | | | Cycadales, | | | | al. 1989 |
| | | | | | Conifers, | | | | |
| | | | | | Basal Eudicots, | | | | |
| | | | | | Asterids | | | | |
| Glycine max | RPRP2 | ″not | POVYKPOVEK (SEQ | 95 | Leptosporangiate | see PFSA Locus 1393 | | | Averyhart- |
| | | glyco- | ID NO: 1079) | | Monilophytes, | | | | Fullard et |
| | | sylated″ | | | Rosids, Asterids | | | | al. 1988; |
| | | | | | | | | | Datta et |
| | | | | | | | | | al. 1989 |
| Medicago | PRP4-type | Ara | KAOVGKPOVY (SEQ | | | | | | Frueauf |
| truncutula | | | ID NO: 1080) | | | | | | et al. |
| | | | | | | | | | 2000 |
| | Other | | | | | | | | |
| Arabidopsis | AG-peptide | AG | [TVS][EDL]AOAO | | | | | | Schultz |
| thaliana | | (Yariv) | [SA]OTS-gpi | | | | | | et |
| | | | anchor (SEQ ID | | | | | | al. 2004 |
| | | | NO: 1081) | | | | | | |
| Arabidopsis | AG-peptide | AG | [TVS][EDL]AOAO | | | | | | Schultz |
| thaliana | | (Yariv) | [SA]OTSGS-gpi | | | | | | et |
| | | | anchor (SEQ ID | | | | | | al. 2004 |
| | | | NO: 1082) | | | | | | |
| Arabidopsis | AG-peptide, | AG | HEGHHHHAOAOAOGO | | | | | | Schultz |
| thaliana | AtAGP24 | (Yariv) | AS-gpi | | | | | | et |
| | | | anchor (SEQ ID | | | | | | al. 2004 |
| | | | NO: 1083) | | | | | | |
| Arabidopsis | Hybrid | AG:Arah | AOVSSOOAK[PO/OP] | | | | | | Hijazi et |
| thaliana | HRGP, | (Yariv) | VK[PO/OP]VY | | | | | | al. 2012 |
| | AtAGP31 | | [PO/OP]TK (SEQ | | | | | | |
| | (GaRSGP | | ID NO: 1084) | | | | | | |
| | orthologue) | | AOVK[PO/OP]TK | | | | | | |
| | | | [PO/OP]VK[PO/OP] | | | | | | |
| | | | VY[PO/OP]TK | | | | | | |
| | | | (SEQ ID NO: | | | | | | |
| | | | 1085) | | | | | | |
| | | | AOVK[PO/OP]VSOO | | | | | | |
| | | | TK[PO/OP]VT[PC/ | | | | | | |
| | | | OP]VYPPK (SEQ | | | | | | |
| | | | ID NO: 1086) | | | | | | |
| | | | AOVK[PO/OP]TK | | | | | | |
| | | | [PO/OP]VK[PO/OP] | | | | | | |
| | | | VSOOAK[PO/OP]VS | | | | | | |
| | | | OOAK[PO/OP] | | | | | | |
| | | | VK[PO/OP]VY | | | | | | |
| | | | [PO/OP]TK (SEQ | | | | | | |
| | | | ID NO: 1087) | | | | | | |
| Nicotiana | Hybrid | Gal: Ara | KHHDHLSOAQA | 2 | Asterids | >DLJZ Locus_8134 | Core | Solanum | Sommer- |
| | | | (SEQ ID NO: | | | (Class 19, shared bias AGP) | eudicot | pty- | Knudsen |
| alata | HRGP, | | 1088) | | | MAKALVLFQLSVLLLSSFTVVSHAHDHLSPA | | canthum | et al. |
| | GaRSGP | | HLSOAQAOK (SEQ | | | QAPKPHKGGHHHHHSPAPSPISYTPTKPPTK | | | 1996 |
| | | | ID NO: 1089) | | | APTKPPTKAPAYSPSKPPAKPPVKPPTPSPS | | | |
| | | | | | | PSPSPYYPTRKPVVVRGLVY (SEQ ID | | | |
| | | | | | | NO: 1090) | | | |
| Nicotiana | Chimeric | AG (Yariv) | aKSKFMIIP[A/O] | | | | | | Mau et |
| alata | AGP, | | SXTX[A/O] (SEQ | | | | | | al. |
| | NaAGP2 | | ID NO: 1091) | | | | | | 1995 |
| | | | [n-term cDNA R | | | | | | |
| | | | not A] | | | | | | |
| Nicotiana | Hybrid | AG: | LFFGKSOKKSOSSOT | 45 | Green Algae, | >YZVJ Locus_6899 | Core | Cepha- | Schultz |
| alata | HRGP, 120 | Ara: Galg | OVNKPS( SEQ | | Asterids, | (Class 19, shared bias AGP) | eudicot | lotus | et |
| | kDa | | ID NO: 1092) | | Rosids, Red | MGSKNCTAIFFMFMIFMLISLPPIYACGTC | | folli- | al. 1997 |
| | | | [A/P]XVVEPO | | Algae, Core | TQPHPPPKHRPGKPGHPKTPHPEPPTPKYPP | | cularis | |
| | | | (SEQ ID NO: | | Eudicots, | FHGGPPKVSPPSKNPPSPPVVEPPIIISPPP | | | |
| | | | 1093) | | Basalmost | VINPPVINPPVIVPP | | | |
| | | | KPOOXAYTQP (SEQ | | angiosperms, | (SEQ ID NO: 1098) | | | |
| | | | ID NO: 1094) | | Conifers, | | | | |
| | | | SSOOXQDAYD (SEQ | | Chromista, | | | | |
| | | | ID NO: 1095) | | Monocots, Mosses | | | | |
| | | | VNPGPG (SEQ ID | | | | | | |
| | | | NO: 1096) | | | | | | |
| | | | LPOOSIHPAG (SEQ | | | | | | |
| | | | ID NO: 1097) | | | | | | |
| Parthenium | Par h1 | | KVCEKPSKTWFGNCK | | | | | | Gupta |
| hystero- | | | DTEKCDKRCMEWEGA | | | | | | 2000 |
| phoruS | | | KHGACHQRESKYMCF | | | | | | |
| | | | CYFDCDPKKNPGOOO | | | | | | |
| | | | GAOGTOGTOAOOGEG | | | | | | |
| | | | EGCAOOGXXAEGOA | | | | | | |
| | | | (SEQ ID | | | | | | |
| | | | NO: 1099) | | | | | | |
| Pyrus | Chimeric | AG (Yariv) | AEAEAOTOALQVVAE | | | | | | Mau et |
| commnis | AGP, | | AOELVOT (SEQ ID | | | | | | al. 1995 |
| | PcAGP2 | | NO: 1100) | | | | | | |
| | | | OVOTOSY (SEQ | | | | | | |
| | | | ID NO: 1101) | | | | | | |
| | | | AEAEAOTOALQVVAE | | | | | | |
| | | | AOEL (SEQ | | | | | | |
| | | | ID NO: 1102) | | | | | | |
| | | | VVAEAOELVOTOVOT | | | | | | |
| | | | OS (SEQ ID | | | | | | |
| | | | NO: 1103) | | | | | | |
| | | | LVOTOVOTOSY | | | | | | |
| | | | (SEQ ID NO: | | | | | | |
| | | | 1104) | | | | | | |
| Senegalia | Hybrid | AG: | SOOO(OTS)LSOSOT | | | | | | Goodru |
| senegal | HRGP, | Ara:NG | OTOO(OL)GP | | | | | | et al. |
| | Gum arabic | 20:70:10 | H (SEQ ID NO: | | | | | | 2000 |
| | glycoprotein | | 1105) | | | | | | |
| Solanum | Chimeric | pentoses | RNRPYITOSOOEASO | | | | | | Pearce et |
| nigrum | HRGP, | | STKQ (SEQ ID | | | | | | al. 2009 |
| | systemin | | NO: 1106) | | | | | | |
| | | | GRHDHVLPOOSOKHE | | | | | | |
| | | | PIIGQ (SEQ | | | | | | |
| | | | ID NO: 1107) | | | | | | |
| | | | GRHDHVOAOOAOKPE | | | | | | |
| | | | DEQGQ | | | | | | |
| | | | (SEQ ID | | | | | | |
| | | | NO: 1108) | | | | | | |
| Solanum | Chimeric | nd | CKLPSOOOOOXOO | 1 | Leptosporangiate | >LHDP_Locus_13011 | Core | Oenothera | Kieliszews |
| tuberosum | HRGP, | | (SEQ ID NO: | | Monilophytes | (Class 19, shared bias AGP) | eudicot | gaura | ki et al. |
| | Lectin | | 1109) | | | MDSSISFFLIIVLQLLSGLAPIIADKSYISY | | | 1994 |
| | | | LPSOOOOOOXXSOOO | | | CALRQKGPCYPPPPPSPPPPPPPSPPSPPHL | | | |
| | | | XXO (SEQ | | | SPSPSPSPPSPPYLSPSPSPPPSPPPHPSQP | | | |
| | | | ID NO: 1110) | | | PPPPPSPPSPPSPSPPPSLLPSPPPPPPPSP | | | |
| | | | LPSOOOOOO(X/H) | | | PSPPSPPPSPTALPP | | | |
| | | | OSOOOOSO (SEQ | | | TNITQGNGNTGIYLHLLKQ | | | |
| | | | ID NO: 1111) | | | (SEQ ID NO: 1113) | | | |
| | | | OSOOOOSOOXO | | | | | | |
| | | | (SEQ ID NO: | | | | | | |
| | | | 1112) | | | | | | |
| Solanum | Chimeric | ″variable | XASTOSPPPLPYPQX | | | | | | Allen et |
| | | | GLKKPGG (SEQ | | | | | | al. 1996 |
| | | | ID NO: 1114) | | | | | | |
| tuberosum | HRGP, | glyco- | DASTOSPPPLPDP | | | | | | |
| | Lectin | sylation″ | (SEQ ID NO: | | | | | | |
| | | | 1115) | | | | | | |
| | | | MPYPEGRSGYQVYSK | | | | | | |
| | | | AQLETXL (SEQ ID | | | | | | |
| | | | NO: 1116) | | | | | | |
| | | | XQPXOSPOOOSOOXO | | | | | | |
| | | | LOOLO (SEQ | | | | | | |
| | | | ID NO: 1117) | | | | | | |
| Zinnia | Chimeric | AG | AHQTGAOAOAADC | | | | | | Motose et |
| elegans | AGP, | (Yariv) | (SEQ ID NO: | | | | | | al. 2004 |
| | ZeXyl1 | | 1118) | | | | | | |

### NUMBERED EMBODIMENTS OF THE DISCLOSURE

[0963] Notwithstanding the appended claims, the disclosure sets forth the following numbered embodiments

### Embodiment Set 1: Stably Transformed Plant Expressing a Fusion Protein Comprising Bovine Kappa-Casein and Bovine Beta-Lactoglobulin

[0964] 1. A stably transformed plant, comprising in its genome: a recombinant DNA construct encoding a fusion protein, the fusion protein comprising: a) bovine kappa-casein; and b) bovine beta-lactoglobulin, wherein the fusion protein is stably expressed in the plant.

[0965] 1.1 The stably transformed plant of embodiment 1, wherein at least one of the bovine kappa-casein or beta-lactoglobulin lack a bovine signal peptide.

[0966] 1.2 The stably transformed plant of embodiment 1, wherein at least one of the bovine kappa-casein or beta-lactoglobulin is a truncated protein, lacking a bovine secretion signal.

[0967] 2. The stably transformed plant of embodiment 1, wherein the fusion protein comprises, in order from N-terminus to C-terminus, the kappa-casein and the beta-lactoglobulin.

[0968] 3. The stably transformed plant of embodiment 1, wherein the fusion protein comprises a protease cleavage site.

[0969] 4. The stably transformed plant of embodiment 3, wherein the protease cleavage site is a chymosin cleavage site.

[0970] 5. The stably transformed plant of embodiment 1, wherein the fusion protein comprises a signal peptide.

[0971] 6. The stably transformed plant of embodiment 5, wherein the signal peptide is located at the N-terminus of the fusion protein.

[0972] 7. The stably transformed plant of embodiment 1, wherein the plant is soybean.

[0973] 8. The stably transformed plant of embodiment 1, wherein the recombinant DNA construct comprises codon-optimized nucleic acids for expression in the plant.

[0974] 9. The stably transformed plant of embodiment 1, wherein the fusion protein has a molecular weight of 30 kDa to 50 kDa.

[0975] 10. The stably transformed plant of embodiment 1, wherein the fusion protein is expressed at a level at least 2-fold higher than kappa-casein expressed individually in a plant.

[0976] 11. The stably transformed plant of embodiment 1, wherein the fusion protein accumulates in the plant at least 2-fold higher than kappa-casein expressed without beta-lactoglobulin.

[0977] 12. The stably transformed plant of embodiment 1, wherein the fusion protein is stably expressed in the plant in an amount of 1% or higher per total protein weight of soluble protein extractable from the plant.

[0978] 13. A transgenic soybean plant, comprising: a recombinant DNA construct encoding a fusion protein, the fusion protein comprising: a) bovine kappa-casein; and b) bovine beta-lactoglobulin, wherein the fusion protein is expressed in the soybean plant.

[0979] 14. The transgenic soybean plant of embodiment 13, wherein the fusion protein comprises, in order from N-terminus to C-terminus, the kappa-casein and the beta-lactoglobulin.

[0980] 15. The transgenic soybean plant of embodiment 13, wherein the fusion protein comprises a protease cleavage site.

[0981] 16. The transgenic soybean plant of embodiment 13, wherein the fusion protein comprises a chymosin cleavage site.

[0982] 17. The transgenic soybean plant of embodiment 13, wherein the fusion protein has a molecular weight of 30 kDa to 50 kDa.

[0983] 18. A transgenic soybean plant, comprising: a recombinant DNA construct encoding a fusion protein, the fusion protein comprising a bovine casein and bovine beta-lactoglobulin.

[0984] 19. The transgenic soybean plant of embodiment 18, wherein the fusion protein comprises, in order from N-terminus to C-terminus, the bovine casein and the beta-lactoglobulin.

[0985] 20. The transgenic soybean plant of embodiment 18, wherein the fusion protein comprises a protease cleavage site.

[0986] 21. The transgenic soybean plant of embodiment 18, wherein the fusion protein comprises a chymosin cleavage site.

[0987] 22. The transgenic soybean plant of embodiment 18, wherein the fusion protein has a molecular weight of 30 kDa to 50 kDa.

### Embodiment Set 2: Stably Transformed Plant Expressing a Fusion Protein Comprising Kappa-Casein or Para-Kappa-Casein and Beta-Lactoglobulin

[0988] 1. A recombinant fusion protein, comprising: a) full-length kappa-casein or para-kappa-casein; and b) beta-lactoglobulin.

[0989] 1.1 The recombinant fusion protein of embodiment 1, wherein at least one of the kappa-casein, para kappa-casein, or beta-lactoglobulin lack a bovine secretion signal peptide.

[0990] 1.2 The recombinant fusion protein of embodiment 1, wherein at least one of the kappa-casein, para kappa-casein, or beta-lactoglobulin is a truncated milk protein, lacking a bovine secretion signal peptide.

[0991] 2. The recombinant fusion protein of embodiment 1, wherein the fusion protein comprises, in order from N-terminus to C-terminus, the full-length kappa-casein or the para-kappa-casein and the beta-lactoglobulin.

[0992] 3. The recombinant fusion protein of embodiment 1, further comprising a protease cleavage site.

[0993] 4. The recombinant fusion protein of embodiment 3, wherein the protease cleavage site is a chymosin cleavage site.

[0994] 5. The recombinant fusion protein of embodiment 1, further comprising a signal peptide.

[0995] 6. The recombinant fusion protein of embodiment 5, wherein the signal peptide is located at the N-terminus of the fusion protein.

[0996] 7. The recombinant fusion protein of embodiment 1, wherein the fusion protein comprises the full-length kappa-casein.

[0997] 8. The recombinant fusion protein of embodiment 1, wherein the fusion protein comprises para-kappa-casein.

[0998] 9. The recombinant fusion protein of embodiment 1, wherein the fusion protein has a molecular weight of 30 kDa to 50 kDa.

[0999] 10. A plant transformed to express the recombinant fusion protein of embodiment 1, wherein the fusion protein is expressed in the plant in an amount of 1% or higher per total protein weight of soluble protein extractable from the plant.

[1000] 11. A plant transformed to express the recombinant fusion protein of embodiment 1, wherein the fusion protein is expressed in the plant at a level at least 2-fold higher than kappa-casein expressed individually in a plant.

[1001] 12. A plant transformed to express the recombinant fusion protein of any one of embodiments 1-1.2, wherein the fusion protein accumulates in the plant at least 2-fold higher than kappa-casein expressed without beta-lactoglobulin.

[1002] 13. A fusion protein comprising kappa-casein and beta-lactoglobulin, wherein the kappa-casein is full-length kappa-casein comprising an amino acid sequence having at least 90% sequence identity to SEQ ID NO: 4 or the kappa-casein is para-kappa-casein comprising an amino acid sequence having at least 90% sequence identity to SEQ ID NO: 2 and wherein the beta-lactoglobulin is full-length beta-lactoglobulin comprising an amino acid sequence having at least 90% sequence identity to SEQ ID NO: 10.

[1003] 14. The fusion protein of embodiment 13, wherein the kappa-casein is full-length kappa-casein comprising an amino acid sequence SEQ ID NO: 4.

[1004] 15. The fusion protein of embodiment 13, wherein the kappa-casein is para-kappa-casein comprising an amino acid sequence SEQ ID NO: 2.

[1005] 16. The fusion protein of embodiment 13, wherein the beta-lactoglobulin comprises the amino acid sequence SEQ ID NO: 10.

[1006] 17. The fusion protein of embodiment 13, further comprising a protease cleavage site between the kappa-casein and beta-lactoglobulin.

[1007] 18. The fusion protein of embodiment 17, wherein the protease cleavage site is a chymosin cleavage site.

[1008] 19. The fusion protein of embodiment 13, further comprising a signal peptide.

[1009] 20. A nucleic acid molecule encoding a fusion protein comprising kappa-casein and beta-lactoglobulin, wherein the kappa-casein is full-length kappa-casein comprising an amino acid sequence having at least 90% sequence identity to SEQ ID NO: 4 or the kappa-casein is para-kappa-casein comprising an amino acid sequence having at least 90% sequence identity to SEQ ID NO: 2 wherein the beta-lactoglobulin is full-length beta-lactoglobulin comprising an amino acid sequence having at least 90% sequence identity to SEQ ID NO: 10.

[1010] 21. The nucleic acid molecule of embodiment 20, wherein the nucleic acid sequence is codon optimized for expression in a plant.

[1011] 22. The nucleic acid molecule of embodiment 21, wherein the plant is soybean.

[1012] 23. An expression vector comprising the nucleic acid molecule of embodiment 20.

[1013] 24. A host cell comprising the expression vector of embodiment 23.

[1014] 25. The host cell of embodiment 24, wherein the host cell is selected from the group consisting of plant cells, bacterial cells, fungal cells, and mammalian cells.

[1015] 26. The host cell of embodiment 25, wherein the host cell is a plant cell.

[1016] 27. A plant stably transformed with the nucleic acid molecule of embodiment 20.

[1017] 28. The plant of embodiment 27, wherein the plant is a monocot selected from the group consisting of turf grass, maize, rice, oat, wheat, barley, sorghum, orchid, iris, lily, onion, palm, and duckweed.

[1018] 29. The plant of embodiment 27, wherein the plant is a dicot selected from the group consisting of Arabidopsis, tobacco, tomato, potato, sweet potato, cassava, alfalfa, lima bean, pea, chick pea, soybean, carrot, strawberry, lettuce, oak, maple, walnut, rose, mint, squash, daisy, quinoa, buckwheat, mung bean, cow pea, lentil, lupin, peanut, fava bean, French beans, mustard, and cactus.

[1019] 30. The plant of embodiment 29, wherein the plant is soybean.

[1020] 31. The plant of embodiment 27, wherein the plant is a non-vascular plant selected from the group consisting of moss, liverwort, hornwort, and algae.

[1021] 32. The plant of embodiment 27, wherein the plant is a vascular plant reproducing from spores.

[1022] 33. A method for stably expressing a recombinant fusion protein comprising kappa-casein and beta-lactoglobulin in a plant, wherein the kappa-casein is full-length kappa-casein comprising an amino acid sequence having at least 90% sequence identity to SEQ ID NO: 4 or the kappa-casein is para-kappa-casein comprising an amino acid sequence having at least 90% sequence identity to SEQ ID NO: 2 and wherein the beta-lactoglobulin is full-length beta-lactoglobulin comprising an amino acid sequence having at least 90% sequence identity to SEQ ID NO: 10, the method comprising: (i) transforming a plant with a plant transformation vector comprising an expression cassette comprising a nucleic acid molecule encoding the fusion protein; and (ii) growing the transformed plant under conditions wherein the recombinant fusion protein is expressed.

[1023] 34. The method of embodiment 33, wherein the fusion protein is expressed in an amount of 1% or higher per the total protein weight of the soluble protein extractable from the plant.

[1024] 35. The method of embodiment 33, wherein the fusion protein is expressed in the plant at a level at least 2-fold higher than kappa-casein expressed individually in a plant.

[1025] 36. The method of embodiment 33, wherein the fusion protein accumulates in the plant at least 2-fold higher than kappa-casein is expressed without beta-lactoglobulin.

[1026] 37. A food composition comprising a fusion protein comprising kappa-casein and beta-lactoglobulin, wherein the kappa-casein is full-length kappa-casein comprising an amino acid sequence having at least 90% sequence identity to SEQ ID NO: 4 or the kappa-casein is para-kappa-casein comprising an amino acid sequence having at least 90% sequence identity to SEQ ID NO: 2 and wherein the beta-lactoglobulin is full-length beta-lactoglobulin comprising an amino acid sequence having at least 90% sequence identity to SEQ ID NO: 10.

[1027] 38. The food composition of embodiment 37, wherein the food composition is selected from the group consisting of cheese and processed cheese products, yogurt and fermented dairy products, directly acidified counterparts of fermented dairy products, cottage cheese dressing, frozen dairy products, frozen desserts, desserts, baked goods, toppings, icings, fillings, low-fat spreads, dairy-based dry mixes, soups, sauces, salad dressing, geriatric nutrition, creams and creamers, analog dairy products, follow-up formula, baby formula, infant formula, milk, dairy beverages, acid dairy drinks, smoothies, milk tea, butter, margarine, butter alternatives, growing up milks, low-lactose products and beverages, medical and clinical nutrition products, protein/nutrition bar applications, sports beverages, confections, meat products, analog meat products, meal replacement beverages, weight management food and beverages, cultured buttermilk, sour cream, yogurt, skyr, leben, lassi, kefir, powder containing a milk protein, and low-lactose products.

### Embodiment Set 3: Recombinant Fusion Protein Comprising Beta-Casein and Beta-Lactoglobulin

[1028] 1. A recombinant fusion protein, comprising: a) beta-casein; and b) beta-lactoglobulin.

[1029] 1.1 The recombinant fusion protein of embodiment 1, wherein at least one of the beta-casein, or beta-lactoglobulin lack a bovine secretion signal peptide.

[1030] 1.2 The recombinant fusion protein of embodiment 1, wherein at least one of the beta-casein, or beta-lactoglobulin is a truncated milk protein, lacking a bovine secretion signal peptide.

[1031] 2. The recombinant fusion protein of embodiment 1, further comprising a protease cleavage site.

[1032] 3. The recombinant fusion protein of embodiment 1, further comprising a chymosin cleavage site.

[1033] 4. A fusion protein, comprising: beta-casein and beta-lactoglobulin, wherein the beta-casein comprises an amino acid sequence having at least 90% sequence identity to SEQ ID NO: 6 and wherein the beta-lactoglobulin comprises an amino acid sequence having at least 90% sequence identity to SEQ ID NO: 10.

[1034] 5. The fusion protein of embodiment 4, further comprising a protease cleavage site.

[1035] 6. The fusion protein of embodiment 4, further comprising a chymosin cleavage site.

[1036] 7. A nucleic acid molecule encoding a fusion protein comprising beta-casein and beta-lactoglobulin, wherein the beta-casein comprises an amino acid sequence having at least 90% sequence identity to SEQ ID NO: 6 and wherein the beta-lactoglobulin comprises an amino acid sequence having at least 90% sequence identity to SEQ ID NO: 10.

[1037] 8. The nucleic acid molecule of embodiment 7, wherein the nucleic acid sequence is codon optimized for expression in a plant.

[1038] 9. The nucleic acid molecule of embodiment 8, wherein the plant is a soybean plant.

[1039] 10. An expression vector comprising the nucleic acid molecule of embodiment 7.

[1040] 11. A host cell comprising the expression vector of embodiment 10.

[1041] 12. The host cell of embodiment 11, wherein the host cell is selected from the group consisting of plant cells, bacterial cells, fungal cells, and mammalian cells.

[1042] 13. The host cell of embodiment 11, wherein the host cell is a plant cell.

[1043] 14. A plant stably transformed with the nucleic acid molecule of embodiment 7.

[1044] 14.1 A plant transformed to express the recombinant fusion protein of any one of embodiments 1-1.2, wherein the fusion protein accumulates in the plant at least 2-fold higher than beta-casein expressed without beta-lactoglobulin.

[1045] 15. The plant of embodiment 14, wherein the plant is a monocot selected from the group consisting of turf grass, maize, rice, oat, wheat, barley, sorghum, orchid, iris, lily, onion, palm, and duckweed.

[1046] 16. The plant of embodiment 14, wherein the plant is a dicot selected from the group consisting of Arabidopsis, tobacco, tomato, potato, sweet potato, cassava, alfalfa, lima bean, pea, chick pea, soybean, carrot, strawberry, lettuce, oak, maple, walnut, rose, mint squash, daisy, quinoa, buckwheat, mung bean, cow pea, lentil, lupin, peanut, fava bean, French beans, mustard, and cactus.

[1047] 17. The plant of embodiment 14, wherein the plant is a soybean plant.

[1048] 18. A food composition, comprising: a fusion protein comprising beta-casein and beta-lactoglobulin.

[1049] 18.1 The food composition of embodiment 18, wherein at least one of the beta-casein, or beta-lactoglobulin lack a bovine secretion signal peptide.

[1050] 18.2 The food composition of embodiment 18, wherein at least one of the beta-casein, or beta-lactoglobulin is a truncated milk protein, lacking a bovine secretion signal peptide.

[1051] 19. The food composition of embodiment 18, wherein the food composition is a solid.

[1052] 20. The food composition of embodiment 18, wherein the food composition is a liquid.

[1053] 21. The food composition of embodiment 18, wherein the food composition is a powder.

[1054] 22. The food composition of embodiment 18, wherein the food composition is selected from the group consisting of: cheese, processed cheese product, yogurt, fermented dairy product, directly acidified counterpart of fermented dairy product, cottage cheese, dressing, frozen dairy product, frozen dessert, dessert, baked good, topping, icing, filling, low-fat spread, dairy-based dry mix, soup, sauce, salad dressing, geriatric nutrition, cream, creamer, analog dairy product, follow-up formula, baby formula, infant formula, milk, dairy beverage, acid dairy drink, smoothie, milk tea, butter, margarine, butter alternative, growing up milk, low-lactose product, low-lactose beverage, medical and clinical nutrition product, protein bar, nutrition bar, sport beverage, confection, meat product, analog meat product, meal replacement beverage, weight management food and beverage, dairy product, cultured buttermilk, sour cream, yogurt, skyr, leben, lassi, kefir, powder containing a milk protein, and low-lactose product.

[1055] 23. The food composition of embodiment 18, wherein the food composition is a dairy product.

[1056] 24. The food composition of embodiment 18, wherein the food composition is an analog dairy product.

[1057] 25. The food composition of embodiment 18, wherein the food composition is a low lactose product.

[1058] 26. The food composition of embodiment 18, wherein the food composition is a milk.

[1059] 27. The food composition of embodiment 18, wherein the food composition is a cheese.

[1060] 28. The food composition of embodiment 18, wherein the food composition is fermented.

### Embodiment Set 4: Seed Processing Composition

[1061] 1. A seed processing composition, comprising: a) a fusion protein, comprising i) a full-length kappa-casein or para-kappa-casein component; and ii) a beta-lactoglobulin component; and b) plant seed tissue.

[1062] 1.1 The seed processing composition of embodiment 1, wherein at least one of the kappa-casein, para kappa-casein, or beta-lactoglobulin lack a bovine secretion signal peptide.

[1063] 1.2 The seed processing composition of embodiment 1, wherein at least one of the kappa-casein, para kappa-casein, or beta-lactoglobulin is a truncated milk protein, lacking a bovine secretion signal peptide.

[1064] 2. The seed processing composition of embodiment 1, wherein the plant seed tissue is ground.

[1065] 3. The seed processing composition of embodiment 1, wherein the plant seed tissue is soybean.

[1066] 4. The seed processing composition of embodiment 1, further comprising at least one member selected from the group consisting of: enzyme, protease, chymosin, extractant, solvent, phenol, buffer, additive, salt, protease inhibitor, peptidase inhibitor, osmolyte, and reducing agent.

[1067] 5. A food composition comprising the seed processing composition of embodiment 1.

[1068] 6. A protein concentrate composition, comprising a protein concentrate of a fusion protein comprising i) a full-length kappa-casein or para-kappa-casein component, and ii) a beta-lactoglobulin component.

[1069] 6.1 The protein concentrate composition of embodiment 6, wherein at least one of the kappa-casein, para kappa-casein, or beta-lactoglobulin lack a bovine secretion signal peptide.

[1070] 6.2 The protein concentrate composition of embodiment 6, wherein at least one of the kappa-casein, para kappa-casein, or beta-lactoglobulin is a truncated milk protein, lacking a bovine secretion signal peptide.

[1071] 7. The protein concentrate composition of embodiment 6, wherein there is no plant seed tissue present.

[1072] 8. The protein concentrate composition of embodiment 6, further comprising at least one member selected from the group consisting of: enzyme, protease, chymosin, extractant, solvent, phenol, buffer, additive, salt, protease inhibitor, peptidase inhibitor, osmolyte, and reducing agent.

[1073] 9. The protein concentrate composition of embodiment 6, further comprising chymosin.

[1074] 10. A food composition comprising the protein concentrate composition of embodiment 6.

[1075] 11. A food composition, comprising: a fusion protein, comprising i) a full-length kappa-casein or para-kappa-casein component, and ii) a beta-lactoglobulin component.

[1076] 12. The food composition of embodiment 11, wherein the food composition comprises the fusion protein comprising the full-length kappa-casein component and a beta-lactoglobulin component.

[1077] 13. The food composition of embodiment 11, wherein the food composition comprises the fusion protein comprising the para-kappa-casein component and a beta-lactoglobulin component.

[1078] 14. The food composition of embodiment 11, wherein the food composition is a solid.

[1079] 15. The food composition of embodiment 11, wherein the food composition is a liquid.

[1080] 16. The food composition of embodiment 11, wherein the food composition is a powder.

[1081] 17. The food composition of embodiment 11, wherein the food composition is selected from the group consisting of: cheese, processed cheese product, fermented dairy product, directly acidified counterpart of fermented dairy product, cottage cheese, dressing, frozen dairy product, frozen dessert, dessert, baked good, topping, icing, filling, low-fat spread, dairy-based dry mix, soup, sauce, salad dressing, geriatric nutrition, cream, creamer, analog dairy product, follow-up formula, baby formula, infant formula, milk, dairy beverage, acid dairy drink, smoothie, milk tea, butter, margarine, butter alternative, growing up milk, low-lactose product, low-lactose beverage, medical and clinical nutrition product, protein bar, nutrition bar, sport beverage, confection, meat product, analog meat product, meal replacement beverage, weight management food and beverage, dairy product, cultured buttermilk, sour cream, yogurt, skyr, leben, lassi, kefir, powder containing a milk protein, and low-lactose product.

[1082] 18. The food composition of embodiment 11, wherein the food composition is a dairy product.

[1083] 19. The food composition of embodiment 11, wherein the food composition is an analog dairy product.

[1084] 20. The food composition of embodiment 11, wherein the food composition is a low lactose product.

[1085] 21. The food composition of embodiment 11, wherein the food composition is a milk.

[1086] 22. The food composition of embodiment 11, wherein the food composition is a cheese.

[1087] 23. The food composition of embodiment 11, wherein the food composition is fermented.

[1088] 24. A method of making a food composition, comprising: combining a fusion protein, comprising i) a full-length kappa-casein or para-kappa-casein component, and ii) a beta-lactoglobulin component, into a food composition.

[1089] 25. The method of embodiment 24, wherein the food composition is selected from the group consisting of: cheese, processed cheese product, yogurt, fermented dairy product, directly acidified counterpart of fermented dairy product, cottage cheese, dressing, frozen dairy product, frozen dessert, dessert, baked good, topping, icing, filling, low-fat spread, dairy-based dry mix, soup, sauce, salad dressing, geriatric nutrition, cream, creamer, analog dairy product, follow-up formula, baby formula, infant formula, milk, dairy beverage, acid dairy drink, smoothie, milk tea, butter, margarine, butter alternative, growing up milk, low-lactose product, low-lactose beverage, medical and clinical nutrition product, protein bar, nutrition bar, sport beverage, confection, meat product, analog meat product, meal replacement beverage, weight management food and beverage, dairy product, cultured buttermilk, sour cream, yogurt, skyr, leben, lassi, kefir, powder containing a milk protein, and low-lactose product.

[1090] 26. The method of embodiment 24, wherein the food composition is a dairy product.

[1091] 27. The method of embodiment 24, wherein the food composition is a cheese.

[1092] 28. A food composition made by the method of embodiment 24.

[1093] 29. A method for making a fusion protein, comprising: (a) transforming a host cell with a vector comprising an expression cassette comprising a nucleic acid molecule encoding the fusion protein, wherein the fusion protein comprises i) a full-length kappa-casein or para-kappa-casein component, and ii) a beta-lactoglobulin component, and (b) growing the transformed host cell under conditions wherein the fusion protein is expressed.

[1094] 30. The method of embodiment 29, wherein the host cell is selected from the group consisting of plant cells, bacterial cells, fungal cells, and mammalian cells.

[1095] 31. The method of embodiment 29, wherein the host cell is a plant cell.

[1096] 32. A fusion protein made by the method of embodiment 29.

### Embodiment Set 5: Transgenic Plant Comprising a Recombinant DNA Encoding a Fusion Protein Comprising Bovine Casein and Bovine Beta-Lactoglobulin

[1097] 1. A transgenic plant, comprising: a recombinant DNA construct encoding a fusion protein, the fusion protein comprising a bovine casein and bovine beta-lactoglobulin.

[1098] 1.1 The transgenic plant of embodiment 1, wherein at least one of the beta-casein, or beta-lactoglobulin lack a bovine secretion signal peptide.

[1099] 1.2 The transgenic plant of embodiment 1, wherein at least one of the beta-casein, or beta-lactoglobulin is a truncated milk protein, lacking a bovine secretion signal peptide.

[1100] 2. The transgenic plant of embodiment 1, wherein the fusion protein comprises a protease cleavage site.

[1101] 3. The transgenic plant of embodiment 1, wherein the fusion protein comprises a chymosin cleavage site.

[1102] 4. The transgenic plant of embodiment 1, wherein the fusion protein has a molecular weight of 30 kDa to 50 kDa.

[1103] 5. A method of making a food composition, comprising: a) extracting the bovine casein and bovine beta-lactoglobulin fusion protein from the transgenic plant of embodiment 1; b) optionally separating the bovine casein from the bovine beta-lactoglobulin; and c) combining the fusion protein or the bovine casein or the bovine beta-lactoglobulin into a food composition.

[1104] 6. The method of embodiment 5, wherein the food composition is selected from the group consisting of: cheese, processed cheese product, fermented dairy product, directly acidified counterpart of fermented dairy product, cottage cheese, dressing, frozen dairy product, frozen dessert, dessert, baked good, topping, icing, filling, low-fat spread, dairy-based dry mix, soup, sauce, salad dressing, geriatric nutrition, cream, creamer, analog dairy product, follow-up formula, baby formula, infant formula, milk, dairy beverage, acid dairy drink, smoothie, milk tea, butter, margarine, butter alternative, growing up milk, low-lactose product, low-lactose beverage, medical and clinical nutrition product, protein bar, nutrition bar, sport beverage, confection, meat product, analog meat product, meal replacement beverage, weight management food and beverage, dairy product, cultured buttermilk, sour cream, yogurt, skyr, leben, lassi, kefir, powder containing a milk protein, and low-lactose product.

[1105] 7. The method of embodiment 5, wherein the bovine casein is not separated from the bovine beta-lactoglobulin and the food composition comprises the fusion protein.

[1106] 8. The method of embodiment 5, wherein the bovine casein is separated from the bovine beta-lactoglobulin and the food composition comprises the bovine casein.

[1107] 9. The method of embodiment 5, wherein the bovine casein is separated from the bovine beta-lactoglobulin and the food composition comprises the bovine beta-lactoglobulin.

[1108] 10. The method of embodiment 5, wherein the food composition is a solid.

[1109] 11. The method of embodiment 5, wherein the food composition is a liquid.

[1110] 12. The method of embodiment 5, wherein the food composition is a powder.

[1111] 13. The method of embodiment 5, wherein the food composition is a dairy product.

[1112] 14. The method of embodiment 5, wherein the food composition is an analog dairy product.

[1113] 15. The method of embodiment 5, wherein the food composition is a low lactose product.

[1114] 16. The method of embodiment 5, wherein the food composition is a milk.

[1115] 17. The method of embodiment 5, wherein the food composition is a cheese.

### Embodiment Set 6: Recombinant Fusion Protein Comprising Casein and Beta-Lactoglobulin

[1116] 1. A recombinant fusion protein, comprising: a) casein; and b) beta-lactoglobulin.

[1117] 1.1 The recombinant fusion protein of embodiment 1, wherein at least one of the casein, or beta-lactoglobulin lack a bovine secretion signal peptide.

[1118] 1.2 The recombinant fusion protein of embodiment 1, wherein at least one of the casein, or beta-lactoglobulin is a truncated milk protein, lacking a bovine secretion signal peptide.

[1119] 2. The recombinant fusion protein of embodiment 1, further comprising a protease cleavage site.

[1120] 3. The recombinant fusion protein of embodiment 1, further comprising a chymosin cleavage site.

[1121] 4. The recombinant fusion protein of embodiment 1, wherein the casein is bovine.

[1122] 5. The recombinant fusion protein of embodiment 1, wherein the β-lactoglobulin is bovine.

[1123] 6. The recombinant fusion protein of embodiment 1, wherein the casein and (3-lactoglobulin are bovine.

[1124] 7. A nucleic acid molecule encoding the recombinant fusion protein of embodiment 1.

[1125] 8. The nucleic acid molecule of embodiment 7, wherein the nucleic acid sequence is codon optimized for expression in a plant.

[1126] 9. The nucleic acid molecule of embodiment 8, wherein the plant is a soybean plant.

[1127] 10. An expression vector comprising the nucleic acid molecule of embodiment 7.

[1128] 11. A host cell comprising the expression vector of embodiment 10.

[1129] 12. The host cell of embodiment 11, wherein the host cell is selected from the group consisting of plant cells, bacterial cells, fungal cells, and mammalian cells.

[1130] 13. The host cell of embodiment 11, wherein the host cell is a plant cell.

[1131] 14. A plant stably transformed with the nucleic acid molecule of embodiment 7.

[1132] 15. The plant of embodiment 14, wherein the plant is a monocot selected from the group consisting of turf grass, maize, rice, oat, wheat, barley, sorghum, orchid, iris, lily, onion, palm, and duckweed.

[1133] 16. The plant of embodiment 14, wherein the plant is a dicot selected from the group consisting of Arabidopsis, tobacco, tomato, potato, sweet potato, cassava, alfalfa, lima bean, pea, chick pea, soybean, carrot, strawberry, lettuce, oak, maple, walnut, rose, mint, squash, daisy, quinoa, buckwheat, mung bean, cow pea, lentil, lupin, peanut, fava bean, French beans, mustard, and cactus.

[1134] 17. The plant of embodiment 14, wherein the plant is a soybean plant.

[1135] 18. A food composition, comprising: a fusion protein comprising casein and (3-lactoglobulin.

[1136] 19. The food composition of embodiment 18, wherein the food composition is a solid.

[1137] 20. The food composition of embodiment 18, wherein the food composition is a liquid.

[1138] 21. The food composition of embodiment 18, wherein the food composition is a powder.

[1139] 22. The food composition of embodiment 18, wherein the food composition is selected from the group consisting of: cheese, processed cheese product, yogurt, fermented dairy product, directly acidified counterpart of fermented dairy product, cottage cheese, dressing, frozen dairy product, frozen dessert, dessert, baked good, topping, icing, filling, low-fat spread, dairy-based dry mix, soup, sauce, salad dressing, geriatric nutrition, cream, creamer, analog dairy product, follow-up formula, baby formula, infant formula, milk, dairy beverage, acid dairy drink, smoothie, milk tea, butter, margarine, butter alternative, growing up milk, low-lactose product, low-lactose beverage, medical and clinical nutrition product, protein bar, nutrition bar, sport beverage, confection, meat product, analog meat product, meal replacement beverage, weight management food and beverage, dairy product, cultured buttermilk, sour cream, skyr, leben, lassi, kefir, powder containing a milk protein, and low-lactose product.

[1140] 23. The food composition of embodiment 18, wherein the food composition is a dairy product.

[1141] 24. The food composition of embodiment 18, wherein the food composition is an analog dairy product.

[1142] 25. The food composition of embodiment 18, wherein the food composition is a low lactose product.

[1143] 26. The food composition of embodiment 18, wherein the food composition is a milk.

[1144] 27. The food composition of embodiment 18, wherein the food composition is a cheese.

[1145] 28. The food composition of embodiment 18, wherein the food composition is fermented.

### Embodiment Set 7: Food Composition Comprising at Least One Component of a Fusion Protein

[1146] 1. A food composition, comprising: at least one component of a fusion protein, the fusion protein comprising i) a bovine casein component and ii) a bovine β-lactoglobulin component, wherein the component has been separated from the fusion protein.

[1147] 1.1 The food composition of embodiment 1, wherein at least one of the casein component, or beta-lactoglobulin component lack a bovine secretion signal peptide.

[1148] 1.2 The food composition of embodiment 1, wherein at least one of the casein component, or beta-lactoglobulin component is a truncated milk protein, lacking a bovine secretion signal peptide.

[1149] 2. The food composition of embodiment 1, wherein the food composition comprises the bovine casein component.

[1150] 3. The food composition of embodiment 1, wherein the food composition comprises the bovine β-lactoglobulin component.

[1151] 4. The food composition of embodiment 1, wherein the food composition is selected from the group consisting of: cheese, processed cheese product, fermented dairy product, directly acidified counterpart of fermented dairy product, cottage cheese, dressing, frozen dairy product, frozen dessert, dessert, baked good, topping, icing, filling, low-fat spread, dairy-based dry mix, soup, sauce, salad dressing, geriatric nutrition, cream, creamer, analog dairy product, follow-up formula, baby formula, infant formula, milk, dairy beverage, acid dairy drink, smoothie, milk tea, butter, margarine, butter alternative, growing up milk, low-lactose product, low-lactose beverage, medical and clinical nutrition product, protein bar, nutrition bar, sport beverage, confection, meat product, analog meat product, meal replacement beverage, weight management food and beverage, dairy product, cultured buttermilk, sour cream, yogurt, skyr, leben, lassi, kefir, powder containing a milk protein, and low-lactose product.

[1152] 5. The food composition of embodiment 1, wherein the food composition is a solid.

[1153] 6. The food composition of embodiment 1, wherein the food composition is a liquid.

[1154] 7. The food composition of embodiment 1, wherein the food composition is a powder.

[1155] 8. The food composition of embodiment 1, wherein the food composition is a dairy product.

[1156] 9. The food composition of embodiment 1, wherein the food composition is an analog dairy product.

[1157] 10. The food composition of embodiment 1, wherein the food composition is a low lactose product.

[1158] 11. The food composition of embodiment 1, wherein the food composition is a milk.

[1159] 12. The food composition of embodiment 1, wherein the food composition is a cheese.

[1160] 13. The food composition of embodiment 1, wherein the food composition is fermented.

[1161] 14. A food composition, comprising: a fusion protein comprising bovine casein and bovine β-lactoglobulin.

[1162] 15. The food composition of embodiment 14, wherein the fusion protein comprises a protease cleavage site.

[1163] 16. The food composition of embodiment 14, wherein the fusion protein comprises a chymosin cleavage site.

[1164] 17. The food composition of embodiment 14, wherein the fusion protein has a molecular weight of 30 kDa to 50 kDa.

[1165] 18. The food composition of embodiment 14, wherein the food composition is selected from the group consisting of: cheese, processed cheese product, fermented dairy product, directly acidified counterpart of fermented dairy product, cottage cheese, dressing, frozen dairy product, frozen dessert, dessert, baked good, topping, icing, filling, low-fat spread, dairy-based dry mix, soup, sauce, salad dressing, geriatric nutrition, cream, creamer, analog dairy product, follow-up formula, baby formula, infant formula, milk, dairy beverage, acid dairy drink, smoothie, milk tea, butter, margarine, butter alternative, growing up milk, low-lactose product, low-lactose beverage, medical and clinical nutrition product, protein bar, nutrition bar, sport beverage, confection, meat product, analog meat product, meal replacement beverage, weight management food and beverage, dairy product, cultured buttermilk, sour cream, yogurt, skyr, leben, lassi, kefir, powder containing a milk protein, and low-lactose product.

[1166] 19. The food composition of embodiment 14, wherein the food composition is a solid.

[1167] 20. The food composition of embodiment 14, wherein the food composition is a liquid.

[1168] 21. The food composition of embodiment 14, wherein the food composition is a powder.

[1169] 22. The food composition of embodiment 14, wherein the food composition is a dairy product.

[1170] 23. The food composition of embodiment 14, wherein the food composition is an analog dairy product.

[1171] 24. The food composition of embodiment 14, wherein the food composition is a low lactose product.

[1172] 25. The food composition of embodiment 14, wherein the food composition is a milk.

[1173] 26. The food composition of embodiment 14, wherein the food composition is a cheese.

[1174] 27. The food composition of embodiment 14, wherein the food composition is fermented.

[1175] 28. The food composition of embodiment 14, wherein the fusion protein is a plant expressed fusion protein.

[1176] 29. The food composition of embodiment 14, wherein the fusion protein is a soybean expressed fusion protein.

### Embodiment Set 8: Alternative Diary Food Composition

[1177] 1. An alternative dairy food composition comprising: i) a recombinant beta-casein protein, and ii) at least one lipid, wherein the alternative dairy food composition does not comprise any other milk proteins; and wherein the recombinant beta-casein protein confers on the alternative dairy food composition one or more characteristics of a dairy food product selected from the group consisting of: taste, aroma, appearance, handling, mouthfeel, density, structure, texture, elasticity, springiness, coagulation, binding, leavening, aeration, foaming, creaminess and emulsification.

[1178] 1.1 The alternative dairy food composition of embodiment 1, wherein the beta-casein lacks a bovine secretion signal peptide.

[1179] 1.2 The alternative dairy food composition of embodiment 1, wherein the beta-casein is a truncated milk protein, lacking a bovine secretion signal peptide.

[1180] 2. The alternative dairy food composition of embodiment 1, wherein the recombinant beta-casein is plant-expressed.

[1181] 3. The alternative dairy food composition of embodiment 2, wherein the recombinant beta-casein is expressed in a soybean plant.

[1182] 4. The alternative dairy food composition of embodiment 1, wherein the composition comprises a fusion protein comprising the recombinant beta-casein.

[1183] 5. The alternative dairy food composition of embodiment 1, wherein the composition is a milk composition, a cream composition, a yogurt composition, an ice cream composition, a frozen custard composition, a frozen dessert composition, a crème fraiche composition, a curd composition, a cottage cheese composition, or a cream cheese composition.

[1184] 6. The alternative dairy food composition of embodiment 1, wherein the composition comprises at least one salt.

[1185] 7. The alternative dairy food composition of embodiment 1, wherein the composition comprises calcium.

[1186] 8. The alternative dairy food composition of embodiment 1, wherein the composition comprises calcium at a concentration of about 0.01% to about 2% by weight.

[1187] 9. The alternative dairy food composition of embodiment 1, wherein the composition has a pH of about 4 to about 8.

[1188] 10. The alternative dairy food composition of embodiment 1, wherein the composition comprises a fusion protein comprising the recombinant beta-casein.

### Embodiment Set 9: Alternative Diary Food Composition

[1189] 1. A cheese composition comprising recombinant casein protein; wherein about 32% to 100% by weight of the total casein protein in the cheese composition is beta-casein; and wherein the cheese composition has the ability to stretch to at least 3 cm in length without breaking, as determined by heating a 100 gram mass of the composition at a temperature of 225° C. for 4 minutes and cooling to about 90° C. and pulling with a fork placed beneath the mass.

[1190] 1.1 The cheese composition of embodiment 1, wherein the beta-casein lacks a bovine secretion signal peptide.

[1191] 1.2 The cheese composition of embodiment 1, wherein the beta-casein is a truncated milk protein, lacking a bovine secretion signal peptide.

[1192] 2. The cheese composition of embodiment 1, wherein the composition does not comprise any casein proteins other than beta-casein.

[1193] 3. The cheese composition of embodiment 1, wherein the composition comprises at least one additional casein protein.

[1194] 4. The cheese composition of embodiment 3, wherein at least 80% by weight of the total casein protein in the composition is beta-casein.

[1195] 5. The cheese composition of embodiment 3, wherein at least 90% by weight of the total casein protein in the composition is beta-casein.

[1196] 6. The cheese composition of embodiment 3, wherein at least 95% by weight of the total casein protein in the composition is beta-casein.

[1197] 7. The cheese composition of embodiment 3, wherein the at least one additional casein protein is selected from kappa-casein, para-kappa-casein, beta-casein, alpha-S1-casein and alpha-S2-casein.

[1198] 8. The cheese composition of embodiment 3, wherein the at least one additional casein protein is kappa-casein.

[1199] 9. The cheese composition of embodiment 3, wherein the at least one additional casein protein is para-kappa casein.

[1200] 10. The cheese composition of embodiment 1, wherein the recombinant beta-casein is plant-expressed.

[1201] 11. The cheese composition of embodiment 10, wherein the recombinant beta-casein is expressed in a soybean plant.

[1202] 12. The cheese composition of embodiment 3, wherein all caseins in the composition are plant-expressed.

[1203] 13. The cheese composition of embodiment 1, wherein the recombinant beta-casein protein is derived from a fusion protein.

[1204] 14. The cheese composition of embodiment 1, wherein the composition does not contain an organoleptically functional amount of beta-lactoglobulin.

[1205] 15. The cheese composition of embodiment 1, wherein the composition has the ability to stretch to at least 5 cm in length without breaking, as determined by heating a 100 gram mass of the composition at a temperature of 225° C. for 4 minutes and cooling to about 90° C. and pulling with a fork placed beneath the mass.

[1206] 16. The cheese composition of embodiment 1, wherein the composition has the ability to stretch to at least 3 cm in length without breaking, as determined by heating a 100 gram mass of the composition at a temperature of 225° C. for 4 minutes and cooling to about 90° C. and pulling with a fork placed beneath the mass; and a firmness of at least 150 grams, as determined by compressing a cylindrical-shaped sample of the cheese composition having a height of 3 cm and a diameter of 3 cm to a height of 1.5 cm at 5° C.

[1207] 17. The cheese composition of embodiment 1, wherein the composition comprises at least one lipid and at least one salt.

[1208] 18. The cheese composition of embodiment 1, wherein the composition comprises calcium.

[1209] 19. The cheese composition of embodiment 18, wherein the composition comprises calcium at a concentration of about 0.01% to about 2% by weight.

[1210] 20. The cheese composition of embodiment 1, wherein the composition has a pH of about 5.2 to about 5.9.

[1211] 21. The cheese composition of embodiment 1, wherein the composition comprises at least one organoleptic property similar to cheese produced from mammalian milk selected from the group consisting of taste, appearance, mouthfeel, structure, texture, density, elasticity, springiness, coagulation, binding, leavening, aeration, foaming, creaminess, and emulsification.

[1212] 22. A method of making the cheese composition of embodiment 1, the method comprising expressing the recombinant beta-casein protein in a plant, extracting the beta-casein from the plant, and combining the beta-casein with at least one lipid and/or salt.

[1213] 23. A cheese composition comprising a recombinant casein protein; wherein about 32% to 100% by weight of the total casein protein in the cheese composition is beta-casein; and wherein the cheese composition has ability to stretch to at least 5 cm in length without breaking, as determined by heating a 100 gram mass of the composition at a temperature of 225° C. for 4 minutes and cooling to about 90° C. and pulling with a fork placed beneath the mass.

[1214] 24. The cheese composition of embodiment 23, wherein the composition does not comprise any additional casein proteins.

[1215] 25. The cheese composition of embodiment 23, wherein the composition comprises at least one additional casein protein, and wherein at least 80% by weight of the total casein protein in the composition is beta-casein.

[1216] 26. The cheese composition of embodiment 25, wherein the at least one additional casein protein is kappa-casein or para-kappa casein.

[1217] 27. The cheese composition of embodiment 23, wherein the recombinant beta-casein is plant-expressed.

[1218] 28. The cheese composition of embodiment 23, wherein the recombinant beta-casein protein is derived from a fusion protein.

[1219] 29. The cheese composition of embodiment 23, wherein the composition has at least one of the following characteristics: i) a firmness of at least 150 grams, as determined by compressing a cylindrical-shaped sample of the cheese composition having a height of 3 cm and a diameter of 3 cm to a height of 1.5 cm at 5° C.; or ii) a melting point of about 35° C. to about 100° C.

[1220] 30. A method of making the cheese composition of embodiment 23, the method comprising expressing the recombinant beta-casein protein in a plant, extracting the beta-casein from the plant, and combining the beta-casein with at least one lipid and/or salt.

### Embodiment Set 10: Fusion Protein Comprising First and Second Milk Proteins, and Transformed Plants Expressing the Same

[1221] 1. A transformed plant comprising in its genome: a recombinant DNA construct encoding a fusion protein, the fusion protein comprising a first protein and a second protein, wherein the first protein and/or second protein is a milk protein, and wherein the fusion protein is expressed in the plant in an amount of 1% or higher per total protein weight of soluble protein extractable from the plant.

[1222] 1.1 The transformed plant of embodiment 1, wherein the first milk protein and/or second milk protein lacks an animal secretion signal peptide.

[1223] 1.2 The transformed plant of embodiment 1, wherein the first milk protein and/or second milk protein is a truncated milk protein, lacking an animal secretion signal peptide.

[1224] 1.3 The transformed plant of embodiment 1, wherein the fusion protein is expressed in an amount of 2%, 3%, 4%, 5%, 6%, 7%, 8%, 9%, 10%, 11%, 12%, 13%, 14%, 15%, 16%, 17%, 18%, 19%, 20% or higher per total protein weight of soluble protein extractable from the plant.

[1225] 1.4 The transformed plant of any one of embodiments 1-1.3, wherein the fusion protein is expressed at least 1, 2, 3, 4, 5, 6, 7, 8, 9, 10, 11, 12, 13, 14, 15, 16, 17, 18, 19, 20, 21, 22, 23, 24, 25, 50, 75, 100, 125, 150, 175, 200 or more fold higher than a control plant expressing only the first or second milk proteins individually.

[1226] 2. The transformed plant of any one of embodiments 1-1.4, wherein the fusion protein comprises, from N-terminus to C-terminus, the first protein and the second protein.

[1227] 3. The transformed plant of any one of embodiments 1-1.4, wherein the fusion protein comprises, from N-terminus to C-terminus, the second protein and the first protein.

[1228] 4. The transformed plant of any one of embodiments 1-3, wherein the milk protein is α-S1 casein, α-S2 casein, β-casein, κ-casein, para-κ-casein, β-lactoglobulin, α-lactalbumin, lysozyme, lactoferrin, lactoperoxidase, or an immunoglobulin.

[1229] 5. The transformed plant of any one of embodiments 1-3, wherein the milk protein is selected from the group consisting of: SEQ ID NO: 4, or a sequence at least 90% identical thereto; SEQ ID NO: 2, or a sequence at least 90% identical thereto; SEQ ID NO: 6, or a sequence at least 90% identical thereto; SEQ ID NO: 8, or a sequence at least 90% identical thereto; SEQ ID NO: 84, or a sequence at least 90% identical thereto; and SEQ ID NO: 10, or a sequence at least 90% identical thereto.

[1230] 6. The transformed plant of any one of embodiments 1-5, wherein each of the first protein and the second protein are milk proteins.

[1231] 7. The transformed plant of any one of embodiments 1-5, wherein the first protein is a milk protein and the second protein is a non-milk protein.

[1232] 8. The transformed plant of embodiment 7, wherein the non-milk protein is albumin, hemoglobin, collagen, ovalbumin, ovotransferrin, GFP, or ovoglobulin.

[1233] 9. The transformed plant of embodiment 6, wherein the first protein and the second protein are each casein proteins.

[1234] 10. The transformed plant of any one of embodiments 1-9, wherein the plant is a dicot.

[1235] 11. The transformed plant of embodiment 10, wherein the dicot is Arabidopsis, tobacco, tomato, potato, sweet potato, cassava, alfalfa, lima bean, pea, chick pea, soybean, carrot, strawberry, lettuce, oak, maple, walnut, rose, mint, squash, daisy, or cactus.

[1236] 12. The transformed plant of any one of embodiments 1-9, wherein the plant is soybean.

[1237] 13. The transformed plant of any one of embodiments 1-12, wherein the fusion protein is stably expressed.

[1238] 14. The transformed plant of any one of embodiments 1-12, wherein the fusion protein is transiently expressed.

[1239] 15. The transformed plant of any one of embodiments 1-14, wherein the recombinant DNA construct is codon-optimized for expression in the plant.

[1240] 16. The transformed plant of any one of embodiments 1-15, wherein the fusion protein comprises a protease cleavage site.

[1241] 17. The transformed plant of embodiment 16, wherein the protease cleavage site is a chymosin cleavage site.

[1242] 18. The transformed plant of any one of embodiments 1-17, wherein the fusion protein is expressed at a level at least 2-fold higher than a casein protein expressed individually in a plant.

[1243] 19. A recombinant fusion protein comprising a first protein and a second protein, wherein at least one of the first protein and the second protein is a milk protein.

[1244] 19.1 The recombinant fusion protein of embodiment 19, wherein the first milk protein and/or second milk protein lacks an animal secretion signal peptide.

[1245] 19.2 The recombinant fusion protein of embodiment 19, wherein the first milk protein and/or second milk protein is a truncated milk protein, lacking an animal secretion signal peptide.

[1246] 20. The recombinant fusion protein of any one of embodiments 19-19.2, wherein the fusion protein comprises, from N-terminus to C-terminus, the first protein and the second protein.

[1247] 21. The recombinant fusion protein of any one of embodiments 19-19.2, wherein the fusion protein comprises, from N-terminus to C-terminus, the second protein and the first protein.

[1248] 22. The recombinant fusion protein of any one of embodiments 19-21, wherein the milk protein is α-S1 casein, (α-S2 casein, β-casein, κ-casein, para-κ-casein, β-lactoglobulin, α-lactalbumin, lysozyme, lactoferrin, lactoperoxidase, or an immunoglobulin.

[1249] 23. The recombinant fusion protein of any one of embodiments 19-21, wherein the milk protein is selected from the group consisting of: SEQ ID NO: 4, or a sequence at least 90% identical thereto; SEQ ID NO: 2, or a sequence at least 90% identical thereto; SEQ ID NO: 6, or a sequence at least 90% identical thereto; SEQ ID NO: 8, or a sequence at least 90% identical thereto; SEQ ID NO: 84, or a sequence at least 90% identical thereto; and SEQ ID NO: 10, or a sequence at least 90% identical thereto.

[1250] 24. The recombinant fusion protein of any one of embodiments 19-23, wherein the first protein and the second protein are milk proteins.

[1251] 25. The recombinant fusion protein of any one of embodiments 19-23, wherein the first protein is a milk protein and the second protein is a non-milk protein.

[1252] 26. The recombinant fusion protein of embodiment 25, wherein the non-milk protein is albumin, hemoglobin, collagen, ovalbumin, ovotransferrin, GFP, or ovoglobulin.

[1253] 27. The recombinant fusion protein of embodiment 24, wherein the first protein and the second protein are each casein proteins.

[1254] 28. The recombinant fusion protein of embodiment 27, wherein the first protein and the second protein are the same casein protein.

[1255] 29. The recombinant fusion protein of embodiment 27, wherein the first protein and the second protein are both α-S1 casein, α-S2 casein, β-casein, κ-casein, or para-κ-casein.

[1256] 30. The recombinant fusion protein of embodiment 24, wherein the first protein and the second protein are each casein proteins and are different from one another.

[1257] 31. The recombinant fusion protein of embodiment 30, wherein the first protein and the second protein are each independently selected from α-S1 casein, α-S2 casein, β-casein, κ-casein, and para-κ-casein.

[1258] 32. A recombinant fusion protein comprising a casein protein and lysozyme, wherein the casein protein is selected from the group consisting of α-S1 casein, α-S2 casein, (3-casein, κ-casein, and para-κ-casein.

[1259] 33. A recombinant fusion protein comprising a casein protein and β-lactoglobulin, wherein the casein protein is selected from the group consisting of α-S1 casein, α-S2 casein, (3-casein, κ-casein, and para-κ-casein.

[1260] 34. The recombinant fusion protein of any one of embodiments 19-33, wherein the fusion protein comprises a protease cleavage site.

[1261] 35. The recombinant fusion protein of embodiment 34, wherein the protease cleavage site is a chymosin cleavage site.

[1262] 36. A nucleic acid encoding the recombinant fusion protein of any one of embodiments 19-35.

[1263] 37. The nucleic acid of embodiment 36, wherein the nucleic acid is codon optimized for expression in a plant species.

[1264] 38. The nucleic of embodiment 36, wherein the nucleic acid is codon optimized for expression in soybean.

[1265] 39. A vector comprising a nucleic acid encoding a recombinant fusion protein, wherein the recombinant fusion protein comprises a first protein and a second protein, wherein at least one of the first protein and the second protein is a milk protein.

[1266] 40. The vector of embodiment 39, wherein the vector is a plasmid.

[1267] 41. The vector of embodiment 40, wherein the vector is an Agrobacterium Ti plasmid.

[1268] 42. The vector of any one of embodiments 39-41, wherein the nucleic acid comprises, in order from 5′ to 3′: a promoter; a 5′ untranslated region; a sequence encoding the fusion protein of any one of embodiments 19-35; and a terminator.

[1269] 43. The vector of embodiment 42, wherein the promoter is a seed-specific promoter.

[1270] 44. The vector of embodiment 43, wherein the seed-specific promoter is selected from the group consisting of PvPhas, BnNap, AtOle1, GmSeed2, GmSeed3, GmSeed5, GmSeed6, GmSeed7, GmSeed8, GmSeed10, GmSeed11, GmSeed12, pBCON, GmCEP1-L, GmTHIC, GmBg7S1, GmGRD, GmOLEA, GmOLER, Gm2S-1, and GmBBld-II.

[1271] 45. The vector of embodiment 43, wherein the seed-specific promoter is PvPhas and comprises the sequence of SEQ ID NO: 18, or a sequence at least 90% identical thereto.

[1272] 46. The vector of embodiment 43, wherein the seed-specific promoter is GmSeed2 and comprises the sequence of SEQ ID NO: 19, or a sequence at least 90% identical thereto.

[1273] 47. The vector of embodiment 42, wherein the 5′ untranslated region is selected from the group consisting of Arc5′UTR and glnB1UTR.

[1274] 48. The vector of embodiment 47, wherein the 5′ untranslated region is Arc5′UTR and comprises the sequence of SEQ ID NO: 20, or a sequence at least 90% identical thereto.

[1275] 49. The vector of embodiment 42, wherein the expression cassette comprises a 3′ untranslated region.

[1276] 50. The vector of embodiment 49, wherein the 3′ untranslated region is Arc5-1 and comprises SEQ ID NO: 21, or a sequence at least 90% identical thereto.

[1277] 51. The vector of embodiment 42, wherein the terminator sequence is a terminator isolated or derived from a gene encoding Nopaline synthase, Arc5-1, an Extensin, Rb7 matrix attachment region, a Heat shock protein, Ubiquitin 10, Ubiquitin 3, and M6 matrix attachment region.

[1278] 52. The vector of embodiment 42, wherein the terminator sequence is isolated or derived from a Nopaline synthase gene and comprises the sequence of SEQ ID NO: 22, or a sequence at least 90% identical thereto.

[1279] 53. The vector of embodiment 42, wherein the terminator sequence is a dual terminator and is selected from the group consisting of: SEQ ID NO: 138, or a sequence at least 90% identical thereto; SEQ ID NO: 141, or a sequence at least 90% identical thereto; SEQ ID NO: 144, or a sequence at least 90% identical thereto; and SEQ ID NO: 146, or a sequence at least 90% identical thereto.

[1280] 54. A plant-expressed recombinant fusion protein, comprising: κ-casein and (3-lactoglobulin.

[1281] 55. The plant-expressed recombinant fusion protein of embodiment 54, wherein the fusion protein comprises, in order from N-terminus to C-terminus, the κ-casein and the (3-lactoglobulin.

[1282] 56. The plant-expressed recombinant fusion protein of embodiment 54 or 55, wherein the fusion protein comprises a protease cleavage site.

[1283] 57. The plant-expressed recombinant fusion protein of embodiment 56, wherein the protease cleavage site is a chymosin cleavage site.

[1284] 58. The plant-expressed recombinant fusion protein of any one of embodiments 55-57, wherein the fusion protein comprises a signal peptide.

[1285] 59. The plant-expressed recombinant fusion protein of embodiment 58, wherein the signal peptide is located at the N-terminus of the fusion protein.

[1286] 60. The plant-expressed recombinant fusion protein of any one of embodiments 55-59, wherein the fusion protein is encoded by a nucleic acid that is codon optimized for expression in a plant.

[1287] 61. The plant-expressed recombinant fusion protein of any one of embodiments 55-60, wherein the fusion protein is expressed in a soybean.

[1288] 62. The plant-expressed recombinant fusion protein of any one of embodiments 55-61, wherein the fusion protein has a molecular weight of 30 kDa to 50 kDa.

[1289] 63. The plant-expressed recombinant fusion protein of any one of embodiments 55-62, wherein the fusion protein is expressed in a plant in an amount of 1% or higher per total protein weight of soluble protein extractable from the plant.

[1290] 64. The plant-expressed recombinant fusion protein of any one of embodiments 55-62, wherein the fusion protein is expressed in the plant at a level at least 2-fold higher than κ-casein expressed individually in a plant.

[1291] 65. The plant-expressed recombinant fusion protein of any one of embodiments 55-62, wherein the fusion protein accumulates in the plant at least 2-fold higher than κ-casein expressed without β-lactoglobulin.

[1292] 66. A stably transformed plant, comprising in its genome: a recombinant DNA construct encoding a fusion protein, the fusion protein comprising: κ-casein and 3-lactoglobulin; wherein the fusion protein is stably expressed in the plant in an amount of 1% or higher per total protein weight of soluble protein extractable from the plant.

[1293] 66.1 The stably transformed plant of embodiment 66, wherein the κ-casein and/or β-lactoglobulin protein lacks an animal secretion signal peptide.

[1294] 66.2 The stably transformed plant of embodiment 66, wherein the κ-casein and/or β-lactoglobulin protein is a truncated milk protein, lacking an animal secretion signal peptide.

[1295] 66.3 The stably transformed plant of embodiment 66, wherein the fusion protein is expressed in an amount of 2%, 3%, 4%, 5%, 6%, 7%, 8%, 9%, 10%, 11%, 12%, 13%, 14%, 15%, 16%, 17%, 18%, 19%, 20% or higher per total protein weight of soluble protein extractable from the plant.

[1296] 66.4 The stably transformed plant of any one of embodiments 66-66.3, wherein the fusion protein is expressed at least 1, 2, 3, 4, 5, 6, 7, 8, 9, 10, 11, 12, 13, 14, 15, 16, 17, 18, 19, 20, 21, 22, 23, 24, 25, 50, 75, 100, 125, 150, 175, 200 or more fold higher than a control plant expressing only the κ-casein or β-lactoglobulin protein individually.

[1297] 67. The stably transformed plant of any one of embodiments 66-66.4, wherein the fusion protein comprises, in order from N-terminus to C-terminus, the κ-casein and the (3-lactoglobulin.

[1298] 68. The stably transformed plant of any one of embodiments 66-67, wherein the fusion protein comprises a protease cleavage site.

[1299] 69. The stably transformed plant of embodiment 68, wherein the protease cleavage site is a chymosin cleavage site.

[1300] 70. The stably transformed plant of any one of embodiments 66-69, wherein the fusion protein comprises a signal peptide.

[1301] 71. The stably transformed plant of embodiment 70, wherein the signal peptide is located at the N-terminus of the fusion protein.

[1302] 72. The stably transformed plant of any one of embodiments 66-71, wherein the plant is soybean.

[1303] 73. The stably transformed plant of any one of embodiments 66-72, wherein the recombinant DNA construct comprises codon-optimized nucleic acids for expression in the plant.

[1304] 74. The stably transformed plant of any one of embodiments 66-73, wherein the fusion protein has a molecular weight of 30 kDa to 50 kDa.

[1305] 75. The stably transformed plant of any one of embodiments 66-74, wherein the fusion protein is expressed at a level at least 2-fold higher than κ-casein expressed individually in a plant.

[1306] 76. The stably transformed plant of any one of embodiments 66-74, wherein the fusion protein accumulates in the plant at least 2-fold higher than κ-casein expressed without β-lactoglobulin.

[1307] 77. A plant-expressed recombinant fusion protein comprising: a casein protein and β-lactoglobulin.

[1308] 78. The plant-expressed recombinant fusion protein of embodiment 77, wherein the casein protein is α-S1 casein, α-S2 casein, β-casein, or κ-casein.

[1309] 79. A stably transformed plant, comprising in its genome: a recombinant DNA construct encoding a fusion protein, the fusion protein comprising: a casein protein and 0-lactoglobulin; wherein the fusion protein is stably expressed in the plant in an amount of 1% or higher per total protein weight of soluble protein extractable from the plant.

[1310] 79.1 The stably transformed plant of embodiment 79, wherein the casein and/or (3-lactoglobulin protein lacks an animal secretion signal peptide.

[1311] 79.2 The stably transformed plant of embodiment 79, wherein the casein and/or (3-lactoglobulin protein is a truncated milk protein, lacking an animal secretion signal peptide.

[1312] 79.3 The stably transformed plant of embodiment 79, wherein the fusion protein is expressed in an amount of 2%, 3%, 4%, 5%, 6%, 7%, 8%, 9%, 10%, 11%, 12%, 13%, 14%, 15%, 16%, 17%, 18%, 19%, 20% or higher per total protein weight of soluble protein extractable from the plant.

[1313] 79.4 The stably transformed plant of any one of embodiments 79-79.3, wherein the fusion protein is expressed at least 1, 2, 3, 4, 5, 6, 7, 8, 9, 10, 11, 12, 13, 14, 15, 16, 17, 18, 19, 20, 21, 22, 23, 24, 25, 50, 75, 100, 125, 150, 175, 200 or more fold higher than a control plant expressing only the casein or β-lactoglobulin protein individually.

[1314] 80. The stably transformed plant of any one of embodiments 79-79.4, wherein the casein protein is α-S1 casein, α-S2 casein, β-casein, or κ-casein.

[1315] 81. A method for stably expressing a recombinant fusion protein in a plant, the method comprising: (a) transforming a plant with a plant transformation vector comprising an expression cassette comprising: a sequence encoding a fusion protein, wherein the fusion protein comprises a first protein and a second protein, wherein at least one of the first protein and the second protein is a milk protein; and (b) growing the transformed plant under conditions wherein the recombinant fusion protein is expressed in an amount of 1% or higher per total protein weight of soluble protein extractable from the plant.

[1316] 82. The method of embodiment 81, wherein the wherein the milk protein is α-S1 casein, α-S2 casein, β-casein, κ-casein, para-κ-casein, β-lactoglobulin, α-lactalbumin, lysozyme, lactoferrin, lactoperoxidase, or an immunoglobulin.

### Embodiment Set 11: Casein Multimers

[1317] 1. A fusion protein comprising a first, second, third, and fourth protein, wherein the third protein is kappa-casein.

[1318] 1.1 A fusion protein comprising a first, second, optionally third, and optionally fourth milk protein.

[1319] 1.2 The fusion protein of embodiment 1 or 1.1, wherein at least one of the first, second, third or fourth proteins lacks an animal secretion signal peptide.

[1320] 1.3 The fusion protein of embodiment 1 or 1.1, wherein at least one of the first, second, third or fourth proteins is a truncated milk protein, lacking an animal secretion signal peptide.

[1321] 1.4 The fusion protein of any one of embodiments 1-1.3, wherein the first, second, third and fourth proteins are selected from the group consisting of α-S1 casein, α-S2 casein, β-casein, κ-casein, para-κ-casein, β-lactoglobulin, α-lactalbumin, lysozyme, lactoferrin, lactoperoxidase, and an immunoglobulin.

[1322] 2. The fusion protein of embodiment 1 wherein: the first protein beta-casein; the second protein is beta-casein; and the fourth protein is beta-lactoglobulin.

[1323] 3. The fusion protein of embodiment 1 or 2, wherein the kappa-casein comprises a chymosin cleavage site.

[1324] 4. The fusion protein of any one of embodiments 1-1.4, wherein cleavage of the fusion protein with chymosin produces the following polypeptides: a first polypeptide comprising the first protein, the second protein, and para-kappa-casein; and a second polypeptide comprising a kappa-casein macropeptide and the fourth protein.

[1325] 5. A nucleic acid encoding the fusion protein of any one of embodiments 1-4.

[1326] 6. A transformed plant comprising the fusion protein of any one of embodiments 1-4 or the nucleic acid of embodiment 5.

[1327] 7. A food composition comprising the fusion protein of any one of embodiments 1-6.

[1328] 8. A food composition comprising a first, second, third or fourth protein, wherein the first, second, third, our fourth protein is derived from the fusion protein of any one of embodiments 1-7.

[1329] 9. A method of making a food composition, the method comprising: (i) expressing a fusion protein in a transformed plant; (ii) preparing a food composition comprising the fusion protein and plant protein from the same transformed plant in which the fusion protein was produced.

[1330] 10. The method of embodiment 9, wherein the transformed plant is soybean.

[1331] 11. A food composition produced using the method of any one of embodiments 9-10.

### Embodiment Set No. 12: Fusion Protein Comprising Milk Protein and a Fusion Partner

[1332] 1. A fusion protein comprising a first protein and a second protein, wherein the first protein is a milk protein, and the second protein comprises at least one of the following characteristics: a molecular weight of 15 kDa or higher; at least 30% hydrophobic amino acids; and/or less than about 2.5 disulfide bonds per 10 kDa molecular weight.

[1333] 2. The fusion protein of embodiment 1, wherein the second protein comprises at least two of the characteristics (i), (ii) and (iii).

[1334] 3. The fusion protein of embodiment 1, wherein the second protein comprises all three of the characteristics (i), (ii) and (iii).

[1335] 4. The fusion protein of any one of embodiments 1-3, wherein the fusion protein comprises a protease cleavage site located between the first protein and the second protein.

[1336] 5. The fusion protein of embodiment 4, wherein the protease cleavage site is a chymosin cleavage site.

[1337] 6. The fusion protein of embodiment 4 or 5, wherein cleavage of the fusion protein with a protease separates the first protein from the second protein.

[1338] 7. The fusion protein of embodiment 6, wherein after being separated from one another, the first protein and/or the second protein optionally comprise at their N-terminus or C-terminus one or more amino acids that do not occur in the native form of the first protein or the second protein and that are derived from the protease cleavage site.

[1339] 8. A nucleic acid encoding the fusion protein of any one of embodiments 1-7.

[1340] 9. A transformed plant comprising the fusion protein of any one of embodiments 1-7 or the nucleic acid of embodiment 8.

[1341] 10. A food composition comprising the fusion protein of any one of embodiments 1-7.

### Embodiment Set 13: Co-Expression of a Milk Protein and a Protein Capable of Forming a Protein Body

[1342] 1. A composition comprising a first vector and a second vector, wherein the first vector comprises a sequence that encodes a milk protein, and the second vector comprises a sequence that encodes a prolamin.

[1343] 2. A composition comprising a vector, wherein the vector comprises: a first sequence that encodes a milk protein; and a second sequence that encodes a prolamin.

[1344] 2.1 The composition of embodiment 1 or 2, wherein the milk protein lacks an animal secretion signal peptide.

[1345] 2.2 The composition of embodiment 1 or 2, wherein the milk proteins is a truncated milk protein, lacking an animal secretion signal peptide.

[1346] 3. The composition of any one of embodiments 1-2.2, wherein the milk protein is selected from the group consisting of: α-S1 casein, α-S2 casein, β-casein, κ-casein, para-κ-casein, β-lactoglobulin, α-lactalbumin, lysozyme, lactoferrin, lactoperoxidase, and an immunoglobulin.

[1347] 4. The composition of embodiment 3, wherein the milk protein is the β-casein.

[1348] 5. The composition of embodiment 3, wherein the milk protein is the (3-lactoglobulin.

[1349] 6. The composition of any one of embodiments 1-5, wherein the prolamin is selected from the group consisting of: gliadin, a hordein, a secalin, a zein, a kafirin, and an avenin.

[1350] 7. The composition of embodiment 6, wherein the prolamin is a zein.

[1351] 8. A plant comprising the composition of any one of embodiments 1-7.

[1352] 9. A method for stably expressing one or more recombinant proteins in a plant, the method comprising transforming a plant with the composition of any one of embodiments 1-7, thereby stably expressing one or more recombinant proteins in the plant.

[1353] 10. The method of embodiment 9, wherein the method is effective in: (a) increasing expression of the one or more recombinant proteins in the plant, relative to expression of the milk protein alone, without co-expression of the prolamin; (b) increasing accumulation of the milk protein in the plant, relative to expression of the milk protein alone, without co-expression of the prolamin; or (c) (a) and (b).

[1354] 11. The method of embodiment 9 or 10, comprising (a), wherein the method is effective in increasing expression of the milk protein by at least about 1-fold, 5-fold, 50-fold, or 100-fold.

[1355] 12. The method of embodiment 9 or 10, comprising (b), wherein the method is effective in increasing accumulation of the milk protein in the plant by at least about 1-fold, 5-fold, 10-fold, or 50-fold.

[1356] 13. A food composition that comprises a recombinant protein isolated from the plant of any one of embodiments 9-12.

[1357] 14. A plant expressing a fusion protein comprising a milk protein and a prolamin.

[1358] 14.1 The composition of embodiment 14, wherein the milk protein lacks an animal secretion signal peptide.

[1359] 14.2 The composition of embodiment 1, wherein the milk proteins is a truncated milk protein, lacking an animal secretion signal peptide.

### Embodiment Set 14: Fusion Protein Comprising a Milk Protein and a Protein Capable of Forming a Protein Body

[1360] 1. A recombinant fusion protein comprising a prolamin protein and a milk protein.

[1361] 1.1 The recombinant fusion of embodiment 1, wherein the milk protein lacks an animal secretion signal peptide.

[1362] 1.2 The recombinant fusion of embodiment 1, wherein the milk proteins is a truncated milk protein, lacking an animal secretion signal peptide.

[1363] 2. The recombinant fusion protein of any one of embodiments 1-1.2, wherein the milk protein is a casein protein.

[1364] 3. The recombinant fusion protein of embodiment 2, wherein the casein protein is α-S1 casein, (α-S2 casein, β-casein, κ-casein, or para-κ-casein.

[1365] 4. The recombinant fusion protein of any one of embodiments 1-1.2, wherein the milk protein is β-lactoglobulin, α-lactalbumin, lysozyme, lactoferrin, lactoperoxidase, or an immunoglobulin.

[1366] 5. The recombinant fusion protein of any one of embodiments 1-4, wherein the prolamin protein is a gliadin, a hordein, a secalin, a zein, a kafirin, or an avenin.

[1367] 6. The recombinant fusion protein of embodiment 5, wherein the prolamin protein is a zein.

[1368] 7. The recombinant fusion protein of embodiment 6, wherein the zein has the sequence of any one of SEQ ID NO: 800, 809 or 811, or a sequence at least 90% identical thereto.

[1369] 8. The recombinant fusion protein of any one of embodiments 1-1.2, wherein the prolamin protein is a canein.

[1370] 9. The recombinant fusion protein of embodiment 8, wherein the canein has the sequence of any one of SEQ ID NO: 800, 809 or 811, or a sequence at least 90% identical thereto.

[1371] 10. The recombinant fusion protein of any one of embodiments 1-1.2, wherein the fusion protein has a sequence of SEQ ID NO: 803 or 807, or a sequence at least 90% identical thereto.

[1372] 11. A nucleic acid encoding the recombinant fusion protein of any one of embodiments 1-10.

[1373] 12. A transgenic plant comprising the recombinant fusion protein of any one of embodiments 1-10 or the nucleic acid of embodiment 11.

[1374] 13. The transgenic plant of embodiment 12, wherein the plant is a dicot.

[1375] 14. The transgenic plant of embodiment 13, wherein the dicot is arabidopsis, tobacco, tomato, potato, sweet potato, cassava, alfalfa, lima bean, pea, chick pea, soybean, carrot, strawberry, lettuce, oak, maple, walnut, rose, mint, squash, daisy, or cactus.

[1376] 15. The transgenic plant of embodiment 13, wherein dicot is a soybean.

[1377] 16. A food composition comprising the recombinant fusion protein of any one of embodiments 1-10, or a prolamin protein or milk protein derived therefrom.

[1378] 17. A protein body comprising a recombinant fusion protein of any one of embodiments 1-10.

[1379] 18. The protein body of embodiment 17, wherein a transgenic plant comprises the protein body.

[1380] 19. The protein body of embodiment 18, wherein the transgenic plant is a dicot.

[1381] 20. The protein body of embodiment 19, wherein the dicot is a soybean.

### Embodiment Set 15: Fusion Protein Comprising an Unstructured Milk Protein and a Structured Protein; Transgenic Plants Expressing the Same

[1382] 1. A stably transformed plant comprising in its genome: a recombinant DNA construct encoding a fusion protein, the fusion protein comprising: (i) an unstructured milk protein, and (ii) a structured animal protein; wherein the fusion protein is stably expressed in the plant in an amount of 1% or higher per total protein weight of soluble protein extractable from the plant.

[1383] 1.1 The stably transformed plant of embodiment 1, wherein the unstructured milk protein lacks an animal secretion signal peptide.

[1384] 1.2 The stably transformed plant of embodiment 1, wherein the unstructured milk proteins is a truncated milk protein, lacking an animal secretion signal peptide.

[1385] 1.3 The stably transformed plant of any one of embodiments 1-1.2, wherein the fusion protein is expressed in an amount of 2%, 3%, 4%, 5%, 6%, 7%, 8%, 9%, 10%, 11%, 12%, 13%, 14%, 15%, 16%, 17%, 18%, 19%, 20% or higher per total protein weight of soluble protein extractable from the plant.

[1386] 1.4 The stably transformed plant of any one of embodiments 1-1.3, wherein the fusion protein is expressed at least 1, 2, 3, 4, 5, 6, 7, 8, 9, 10, 11, 12, 13, 14, 15, 16, 17, 18, 19, 20, 21, 22, 23, 24, 25, 50, 75, 100, 125, 150, 175, 200 or more fold higher than a control plant expressing only the unstructured milk protein individually.

[1387] 2. The stably transformed plant of any one of embodiments 1-1.2, wherein the fusion protein comprises, from N-terminus to C-terminus, the unstructured milk protein and the animal protein.

[1388] 3. The stably transformed plant of any one of embodiments 1-2, wherein the unstructured milk protein is α-S1 casein, α-S2 casein, β-casein, or κ-casein.

[1389] 4. The stably transformed plant of embodiment 1, wherein the unstructured milk protein is κ-casein and comprises the sequence of SEQ ID NO: 4, or a sequence at least 90% identical thereto.

[1390] 5. The stably transformed plant of any one of embodiments 1-1.4, wherein the unstructured milk protein is para-κ-casein and comprises the sequence of SEQ ID NO: 2, or a sequence at least 90% identical thereto.

[1391] 6. The stably transformed plant of any one of embodiments 1-1.4, wherein the unstructured milk protein is β-casein and comprises the sequence of SEQ ID NO: 6, or a sequence at least 90% identical thereto.

[1392] 7. The stably transformed plant of any one of embodiments 1-1.4, wherein the unstructured milk protein is α-S1 casein and comprises the sequence SEQ ID NO: 8, or a sequence at least 90% identical thereto.

[1393] 8. The stably transformed plant of any one of embodiments 1-1.4, wherein the unstructured milk protein is α-S2 casein and comprises the sequence SEQ ID NO: 84, or a sequence at least 90% identical thereto.

[1394] 9. The stably transformed plant of any one of embodiments 1-8, wherein the structured animal protein is a structured mammalian protein.

[1395] 10. The stably transformed plant of embodiment 9, wherein the structured mammalian protein is β-lactoglobulin, α-lactalbumin, albumin, lysozyme, lactoferrin, lactoperoxidase, hemoglobin, collagen, or an immunoglobulin.

[1396] 11. The stably transformed plant of embodiment 9, wherein the structured mammalian protein is β-lactoglobulin and comprises the sequence of SEQ ID NO: 10, or a sequence at least 90% identical thereto.

[1397] 12. The stably transformed plant of any one of embodiments 1-8, wherein the structured animal protein is a structured avian protein.

[1398] 13. The stably transformed plant embodiment 12, wherein the structured avian protein is ovalbumin, ovotransferrin, lysozyme or ovoglobulin.

[1399] 14. The stably transformed plant of embodiment 9, wherein the milk protein is κ-casein and the structured mammalian protein is β-lactoglobulin.

[1400] 15. The stably transformed plant of embodiment 9, wherein the milk protein is para-κ-casein and the structured mammalian protein is β-lactoglobulin.

[1401] 16. The stably transformed plant of embodiment 9, wherein the milk protein is (3-casein and the structured mammalian protein is β-lactoglobulin.

[1402] 17. The stably transformed plant of embodiment 9, wherein the milk protein is α-S1 casein or α-S2 casein and the structured mammalian protein is β-lactoglobulin.

[1403] 18. The stably transformed plant of any one of embodiments 1-17, wherein the plant is a dicot.

[1404] 19. The stably transformed plant of embodiment 18, wherein the dicot is Arabidopsis, tobacco, tomato, potato, sweet potato, cassava, alfalfa, lima bean, pea, chick pea, soybean, carrot, strawberry, lettuce, oak, maple, walnut, rose, mint, squash, daisy, Quinoa, buckwheat, mung bean, cow pea, lentil, lupin, peanut, fava bean, French beans (i.e., common beans), mustard, or cactus.

[1405] 20. The stably transformed plant of any one of embodiments 1-19, wherein the plant is soybean.

[1406] 21. The stably transformed plant of any one of embodiments 1-20, wherein the recombinant DNA construct is codon-optimized for expression in the plant.

[1407] 22. The stably transformed plant of any one of embodiments 1-21, wherein the fusion protein comprises a protease cleavage site.

[1408] 23. The stably transformed plant of embodiment 22, wherein the protease cleavage site is a chymosin cleavage site.

[1409] 24. The stably transformed plant of any one of embodiments 1-23, wherein the fusion protein is expressed at a level at least 2-fold higher than an unstructured milk protein expressed individually in a plant.

[1410] 25. The stably transformed plant of any one of embodiments 1-24, wherein the fusion protein accumulates in the plant at least 2-fold higher than an unstructured milk protein expressed without the structured animal protein.

[1411] 26. A recombinant fusion protein comprising: (i) an unstructured milk protein, and (ii) a structured animal protein.

[1412] 26.1 The recombinant fusion protein of embodiment 26, wherein the unstructured milk protein lacks an animal secretion signal peptide.

[1413] 26.2 The recombinant fusion protein of embodiment 26, wherein the unstructured milk protein is a truncated milk protein, lacking an animal secretion signal peptide.

[1414] 27. The recombinant fusion protein of any one of embodiments 26-26.2, wherein the fusion protein is expressed in a plant.

[1415] 28. The recombinant fusion protein of any one of embodiments 26-27, wherein the unstructured milk protein is α-S1 casein, α-S2 casein, β-casein, or κ-casein.

[1416] 29. The recombinant fusion protein of embodiment 28, wherein the milk protein is κ-casein and comprises the sequence of SEQ ID NO: 4, or a sequence at least 90% identical thereto.

[1417] 30. The recombinant fusion protein of embodiment 28, wherein the milk protein is para-κ-casein and comprises the sequence of SEQ ID NO: 2, or a sequence at least 90% identical thereto.

[1418] 31. The recombinant fusion protein of embodiment 28, wherein the milk protein is β-casein and comprises the sequence of SEQ ID NO: 6, or a sequence at least 90% identical thereto.

[1419] 32. The recombinant fusion protein of embodiment 28, wherein the milk protein is α-S1 casein and comprises the sequence SEQ ID NO: 8, or a sequence at least 90% identical thereto.

[1420] 33. The recombinant fusion protein of embodiment 28, wherein the milk protein is α-S2 casein and comprises the sequence SEQ ID NO: 84, or a sequence at least 90% identical thereto.

[1421] 34. The recombinant fusion protein of any one of embodiments 26-33, wherein the structured animal protein is a structured mammalian protein.

[1422] 35. The recombinant fusion protein of embodiment 34, wherein the structured mammalian protein is β-lactoglobulin, α-lactalbumin, albumin, lysozyme, lactoferrin, lactoperoxidase, hemoglobin, collagen, or an immunoglobulin.

[1423] 36. The recombinant fusion protein of embodiment 34, wherein the structured mammalian protein is β-lactoglobulin and comprises the sequence of SEQ ID NO: 10, or a sequence at least 90% identical thereto.

[1424] 37. The recombinant fusion protein of any one of embodiments 26-33, wherein the structured animal protein is a structured avian protein.

[1425] 38. The recombinant fusion protein of embodiment 37, wherein the structured avian protein is ovalbumin, ovotransferrin, lysozyme or ovoglobulin.

[1426] 39. The recombinant fusion protein embodiment 34, wherein the milk protein is κ-casein and the structured mammalian protein is β-lactoglobulin.

[1427] 40. The recombinant fusion protein of embodiment 34, wherein the milk protein is para-κ-casein and the structured mammalian protein is β-lactoglobulin.

[1428] 41. The recombinant fusion protein of embodiment 34, wherein the milk protein is β-casein and the structured mammalian protein is β-lactoglobulin.

[1429] 42. The recombinant fusion protein of embodiment 34, wherein the milk protein is α-S1 casein or α-S2 casein and the structured mammalian protein is β-lactoglobulin.

[1430] 43. The recombinant fusion protein of embodiment 34, wherein the fusion protein comprises a protease cleavage site.

[1431] 44. The recombinant fusion protein of embodiment 34, wherein the protease cleavage site is a chymosin cleavage site.

[1432] 45. A nucleic acid encoding the recombinant fusion protein of any one of embodiments 26 to 44.

[1433] 46. The nucleic acid of embodiment 45, wherein the nucleic acid is codon optimized for expression in a plant species.

[1434] 47. The nucleic of embodiment 45 or 46, wherein the nucleic acid is codon optimized for expression in soybean.

[1435] 48. A vector comprising a nucleic acid encoding a recombinant fusion protein, wherein the recombinant fusion protein comprises: (i) an unstructured milk protein, and (ii) a structured animal protein.

[1436] 49. The vector of embodiment 48, wherein the vector is a plasmid.

[1437] 50. The vector of embodiment 49, wherein the vector is an Agrobacterium Ti plasmid.

[1438] 51. The vector of any one of embodiments 48-50, wherein the nucleic acid comprises, in order from 5′ to 3′: a promoter; a 5′ untranslated region; a sequence encoding the fusion protein; and a terminator.

[1439] 52. The vector of embodiment 51, wherein the promoter is a seed-specific promoter.

[1440] 53. The vector of embodiment 52, wherein the seed-specific promoter is selected from the group consisting of PvPhas, BnNap, AtOle1, GmSeed2, GmSeed3, GmSeed5, GmSeed6, GmSeed7, GmSeed8, GmSeed10, GmSeed11, GmSeed12, pBCON, GmCEP1-L, GmTHIC, GmBg7S1, GmGRD, GmOLEA, GmOLER, Gm2S-1, and GmBBld-II.

[1441] 54. The vector of embodiment 53, wherein the seed-specific promoter is PvPhas and comprises the sequence of SEQ ID NO: 18, or a sequence at least 90% identical thereto.

[1442] 55. The vector of embodiment 53, wherein the seed-specific promoter is GmSeed2 and comprises the sequence of SEQ ID NO: 19, or a sequence at least 90% identical thereto.

[1443] 56. The vector of any one of embodiments 51-55, wherein the 5′ untranslated region is selected from the group consisting of Arc5′UTR and glnB1UTR.

[1444] 57. The vector of embodiment 56, wherein the 5′ untranslated region is Arc5′UTR and comprises the sequence of SEQ ID NO: 20, or a sequence at least 90% identical thereto.

[1445] 58. The vector of any one of embodiments 51-57, wherein the expression cassette comprises a 3′ untranslated region.

[1446] 59. The vector of embodiment 58, wherein the 3′ untranslated region is Arc5-1 and comprises SEQ ID NO: 21, or a sequence at least 90% identical thereto.

[1447] 60. The vector of any one of embodiments 51-59, wherein the terminator sequence is a terminator isolated or derived from a gene encoding Nopaline synthase, Arc5-1, an Extensin, Rb7 matrix attachment region, a Heat shock protein, Ubiquitin 10, Ubiquitin 3, and M6 matrix attachment region.

[1448] 61. The vector of embodiment 60, wherein the terminator sequence is isolated or derived from a Nopaline synthase gene and comprises the sequence of SEQ ID NO: 22, or a sequence at least 90% identical thereto.

[1449] 62. A plant comprising the recombinant fusion protein of any one of embodiments 26-44 or the nucleic acid of any one of embodiments 45-47.

[1450] 63. A method for stably expressing a recombinant fusion protein in a plant, the method comprising: a) transforming a plant with a plant transformation vector comprising an expression cassette comprising: a sequence encoding a fusion protein, wherein the fusion protein comprises an unstructured milk protein, and a structured animal protein; and b) growing the transformed plant under conditions wherein the recombinant fusion protein is expressed in an amount of 1% or higher per total protein weight of soluble protein extractable from the plant.

[1451] 64. The method of embodiment 63, wherein the unstructured milk protein is κ-casein.

[1452] 65. The method of embodiment 63 or 64, wherein the structured animal protein is β-lactoglobulin.

[1453] 66. A food composition comprising the recombinant fusion protein of any one of embodiments 26-44.

[1454] 67. A method for making a food composition, the method comprising: expressing the recombinant fusion protein of any one of embodiments 26-44 in a plant; extracting the recombinant fusion protein from the plant; optionally, separating the milk protein from the structured animal protein or the structured plant protein; and creating a food composition using the milk protein or the fusion protein.

[1455] 68. The method of embodiment 67, wherein the plant stably expresses the recombinant fusion protein.

[1456] 69. The method of embodiment 68, wherein the plant expresses the recombinant fusion protein in an amount of 1% or higher per total protein weight of soluble protein extractable from the plant.

[1457] 70. The method of any one of embodiments 67-69, wherein the plant is soybean.

[1458] 71. The method of any one of embodiments 67-70, wherein the food composition comprises the structured animal or plant protein.

[1459] 72. The method of any one of embodiments 67-71, wherein the milk protein and the structured animal or plant protein are separated from one another in the plant cell, prior to extraction.

[1460] 73. The method of any one of embodiments 67-71, wherein the milk protein is separated from the structured animal or plant protein after extraction, by contacting the fusion protein with an enzyme that cleaves the fusion protein.

[1461] 74. A food composition produced using the method of any one of embodiments 67-73.

### Embodiment Set Number 16: Modulation of Post-Translational Modifications by Modifying the Amino Acid Sequence of a Milk Protein

[1462] 1. A recombinant milk protein, wherein the amino acid sequence of the milk protein is modified to promote addition of one or more post-translational modifications in a plant cell.

[1463] 2. The recombinant milk protein of embodiment 1, wherein the milk protein is expressed in a plant, and wherein the milk protein comprises one or more post-translational modifications that are not present in a non-modified milk protein expressed in the same type of plant.

[1464] 3. The recombinant milk protein of embodiment 1, wherein the milk protein is expressed in a plant in an amount of 1% or higher per total protein weight of soluble protein extractable from the plant.

[1465] 4. The recombinant milk protein of any one of embodiments 1-3, wherein the milk protein is a casein protein selected from α-S1 casein, α-S2 casein, β-casein, κ-casein, and para-κ-casein.

[1466] 5. The recombinant milk protein of any one of embodiments 1-4, wherein the milk protein is κ-casein or para-k-casein.

[1467] 6. The recombinant milk protein of any one of embodiments 1-4, wherein the milk protein is β-casein.

[1468] 7. The recombinant milk protein of any one of embodiments 1-4, wherein the milk protein is β-lactoglobulin.

[1469] 8. The recombinant milk protein of any one of embodiments 1-7, wherein the one or more post-translational modifications are selected from glycosylation, phosphorylation, lipidation, ubiquitylation, nitrosylation, methylation, acetylation, amidation, prenylation, alkylation, gamma-carboxylation, biotinylation, oxidation, and sulfation.

[1470] 9. A nucleic acid encoding the recombinant milk protein of any one of embodiments 1-8.

### Embodiment Set Number 17: Modulation of Post-Translational Modifications (PTMs) by Expressing One or More Enzymes which Add/Remove PTMs

[1471] 1. A method for stably expressing a milk protein in a plant, the method comprising: transforming the plant with a sequence encoding the milk protein and a sequence encoding a kinase.

[1472] 1.1 The method of embodiment 1, wherein the milk protein lacks an animal secretion signal peptide.

[1473] 1.2 The method of embodiment 1, wherein the milk protein is a truncated milk protein, lacking an animal secretion signal peptide.

[1474] 2. The method of any one of embodiments 1-1.2, wherein the milk protein is a casein protein selected from the group consisting of: α-S1 casein, α-S2 casein, β-casein, κ-casein, para-κ-casein.

[1475] 3. The method of any one of embodiments 1-2, wherein the milk protein is fused to a second protein.

[1476] 4. The method of any one of embodiments 1-3, wherein the kinase is a kinase in the 20 C family.

[1477] 4.1 The method of any one of embodiments 1-3, wherein the kinase is a kinase in the Casein Kinase 1 (CK1).

[1478] 4.2 The method of any one of embodiments 1-3, wherein the kinase is a kinase in the Casein Kinase 2 (CK2).

[1479] 4.3 The method of any one of embodiments 1-3, wherein the kinase is a kinase in the FAMK-1.

[1480] 4.4 The method of any one of embodiments 1-3, wherein the kinase is a kinase in the Early Flowering1 (EL1)-like proteins.

[1481] 5. The method of any one of embodiments 1-3, wherein the kinase that phosphorylates Ser-X-Glu/pSer motifs.

[1482] 5.1 The method of any one of embodiments 1-3, wherein the kinase that phosphorylates pS/pT-X-X-S/T, or (E,D)n-X-X-S/T motifs.

[1483] 5.2 The method of any one of embodiments 1-3, wherein the kinase that phosphorylates S/T-X-X-E/D/pS/pY motifs.

[1484] 5.3 The method of any one of embodiments 1-3, wherein the kinase that phosphorylates S-X-S/pE motifs.

[1485] 6. The method of any one of embodiments 1-3, wherein the kinase is a Fam20C kinase, or a fragment or variant thereof.

[1486] 6.1 The method of any one of embodiments 1-3, wherein the kinase is a Casein Kinase 1 (CK1), or a fragment or variant thereof.

[1487] 6.2 The method of any one of embodiments 1-3, wherein the kinase is a Casein Kinase 2 (CK2), or a fragment or variant thereof.

[1488] 6.3 The method of any one of embodiments 1-3, wherein the kinase is a FAMK-1, or a fragment or variant thereof.

[1489] 6.1 The method of any one of embodiments 1-3, wherein the kinase is a Early Flowering1 (EL1)-like proteins, or a fragment or variant thereof.

[1490] 7. The method of any one of embodiments 1-3, wherein the kinase comprises SEQ ID NO: 821, or a sequence at least 90% or 95% identical thereto.

[1491] 8. The method of any one of embodiments 1-3, wherein the kinase comprises amino acids 94-586 of SEQ ID NO: 821, or a sequence at least 90% or 95% identical thereto.

[1492] 9. The method of any one of embodiments 1-8, wherein the sequence encoding the milk protein and the sequence encoding the kinase are in the same vector.

[1493] 10. The method of embodiment 9, wherein the vector is a binary vector.

[1494] 11. A stably transformed plant expressing a milk protein and a heterologous kinase.

[1495] 11.1 The stably transformed plant of embodiment 11, wherein the milk protein lacks an animal secretion signal peptide.

[1496] 11.2 The stably transformed plant of embodiment 11, wherein the milk protein is a truncated milk protein, lacking an animal secretion signal peptide.

[1497] 12. The stably transformed plant of any one of embodiments 11-11.2, wherein the milk protein is a casein protein selected from the group consisting of: α-S1 casein, α-S2 casein, β-casein, κ-casein, para-κ-casein.

[1498] 13. The stably transformed plant of any one of embodiments 11-12, wherein the milk protein is fused to a second protein.

[1499] 14. The stably transformed plant of any one of embodiments 11-13, wherein the kinase is a kinase in the 20C family.

[1500] 14.1 The stably transformed plant of any one of embodiments 11-13, wherein the kinase is a kinase in the Casein Kinase 1 (CK1).

[1501] 14.2 The stably transformed plant of any one of embodiments 11-13, wherein the kinase is a kinase in the Casein Kinase 2 (CK2).

[1502] 14.3 The stably transformed plant of any one of embodiments 11-13, wherein the kinase is a kinase in the FAMK-1.

[1503] 14.4 The stably transformed plant of any one of embodiments 11-13, wherein the kinase is a kinase in the Early Flowering1 (EL1)-like proteins.

[1504] 15. The stably transformed plant of any one of embodiments 11-13, wherein the kinase that phosphorylates Ser-X-Glu/pSer motifs.

[1505] 15.1 The stably transformed plant of any one of embodiments 11-13, wherein the kinase that phosphorylates pS/pT-X-X-S/T, or (E,D)n-X-X-S/T motifs.

[1506] 15.2 The stably transformed plant of any one of embodiments 11-13, wherein the kinase that phosphorylates S/T-X-X-E/D/pS/pY motifs.

[1507] 15.3 The stably transformed plant of any one of embodiments 11-13, wherein the kinase that phosphorylates S—X-S/pE motifs.

[1508] 16. The stably transformed plant of any one of embodiments 11-13, wherein the kinase is a Fam20C kinase, or a fragment or variant thereof.

[1509] 16.1 The stably transformed plant of any one of embodiments 11-13, wherein the kinase is a Casein Kinase 1 (CK1), or a fragment or variant thereof.

[1510] 16.2 The stably transformed plant of any one of embodiments 11-13, wherein the kinase is a Casein Kinase 2 (CK2), or a fragment or variant thereof.

[1511] 16.3 The stably transformed plant of embodiments 11-13, wherein the kinase is a FAMK-1, or a fragment or variant thereof.

[1512] 16.4 The stably transformed plant of any one of embodiments 11-13, wherein the kinase is an Early Flowering1 (EL1)-like proteins, or a fragment or variant thereof.

[1513] 17. The stably transformed plant of any one of embodiments 11-13, wherein the kinase comprises SEQ ID NO: 821, or a sequence at least 90% or 95% identical thereto.

[1514] 18. The stably transformed plant of any one of any one of embodiments 11-13, wherein the kinase comprises amino acids 94-586 of SEQ ID NO: 821, or a sequence at least 90% or 95% identical thereto.

[1515] 19. The stably transformed plant of any one of embodiments 11-18, wherein the milk protein is expressed in an amount of %, 3%, 4%, 5%, 6%, 7%, 8%, 9%, 10%, 11%, 12%, 13%, 14%, 15%, 16%, 17%, 18%, 19%, 20% or higher per total protein weight of soluble protein extractable from the plant.

[1516] 20. The stably transformed plant of any one of embodiments 11-19, wherein the milk protein is expressed at least 1, 2, 3, 4, 5, 6, 7, 8, 9, 10, 11, 12, 13, 14, 15, 16, 17, 18, 19, 20, 21, 22, 23, 24, 25, 50, 75, 100, 125, 150, 175, 200 or more fold higher than a control plant expressing only the milk protein without the heterologous kinase.

### Embodiment Set Number 18: Fusion of a Milk Protein to a Glycoprotein Tag

[1517] 1. A method for stably expressing a milk protein in a plant, the method comprising: transforming the plant with a sequence encoding a milk protein fused to a glycoprotein tag.

[1518] 1.1 The method of embodiment 1, wherein the milk protein lacks an animal secretion signal peptide.

[1519] 1.2 The method of embodiment 1, wherein the milk protein is a truncated milk protein, lacking an animal secretion signal peptide.

[1520] 2. The method of any one of embodiments 1-1.2, wherein the milk protein is a casein protein selected from the group consisting of: α-S1 casein, α-S2 casein, β-casein, κ-casein, para-κ-casein.

[1521] 3. The method of any one of embodiments 1-2, wherein the milk protein is fused to a second protein.

[1522] 4. The method of any one of any one of embodiments 1-3, wherein the glycoprotein tag is isolated or derived from a hydroxyproline (Hyp)-rich glycoprotein (GRGP).

[1523] 5. The method of any one of embodiments 1-3, wherein the glycoprotein tag comprises the M domain of CD45.

[1524] 6. The method of any one of embodiments 1-3, wherein the glycoprotein tag is an (SP)11 tag.

[1525] 6.1 The method of any one of embodiments 1-3, wherein the glycoprotein tag is an (SP)11 tag.

[1526] 6.2 The method of any one of embodiments 1-3, wherein the glycoprotein tag is an (SP)10 tag.

[1527] 6.3 The method of any one of embodiments 1-3, wherein the glycoprotein tag is an (SP)20 tag.

[1528] 6.4 The method of any one of embodiments 1-3, wherein the glycoprotein tag is an (SP)32 tag.

[1529] 6.5 The method of any one of embodiments 1-3, wherein the glycoprotein tag is an (SP)18 tag.

[1530] 6.6 The method of any one of embodiments 1-3, wherein the glycoprotein tag is a rabies glycoprotein (rgp) tag.

[1531] 6.7 The method of any one of embodiments 1-3, wherein the glycoprotein tag is an ANITVNITV tag.

[1532] 6.8 The method of any one of embodiments 1-3, wherein the glycoprotein tag is a CD45 tag.

[1533] 7. The method of any one of embodiments 1-3, wherein the glycoprotein tag comprises SEQ ID NO: 825, or a sequence at least 90% or 95% identical thereto.

[1534] 8. The method of any one of embodiments 1-3, wherein the glycoprotein tag comprises SEQ ID NO: 827, or a sequence at least 90% or 95% identical thereto.

[1535] 9. The method of any one of embodiments 1-8, wherein the sequence encoding the milk protein and the sequence encoding the kinase are in the same vector.

[1536] 10. The method of embodiment 9, wherein the vector is a binary vector.

[1537] 11. A stably transformed plant comprising: a milk protein fused to a glycoprotein tag.

[1538] 11.1 The stably transformed plant of embodiment 11, wherein the milk protein lacks an animal secretion signal peptide.

[1539] 11.2 The stably transformed plant of embodiment 11, wherein the milk protein is a truncated milk protein, lacking an animal secretion signal peptide.

[1540] 12. The stably transformed plant of embodiments 11-11.2, wherein the milk protein is a casein protein selected from the group consisting of: α-S1 casein, α-S2 casein, β-casein, κ-casein, para-κ-casein.

[1541] 13. The stably transformed plant of embodiments 11-12, wherein the milk protein is fused to a second protein.

[1542] 14. The stably transformed plant of any one of embodiments 11-13, wherein the glycoprotein tag is isolated or derived from a hydroxyproline (Hyp)-rich glycoprotein (GRGP).

[1543] 15. The stably transformed plant of embodiments 11-13, wherein the glycoprotein tag comprises the M domain of CD45.

[1544] 16. The stably transformed plant of embodiments 11-13, wherein the glycoprotein tag is an (SP)11 tag.

[1545] 16.1 The stably transformed plant of embodiments 11-13, wherein the glycoprotein tag is an (SP)11 tag.

[1546] 16.2 The stably transformed plant of embodiments 11-13, wherein the glycoprotein tag is an (SP)10 tag.

[1547] 16.3 The stably transformed plant of embodiments 11-13, wherein the glycoprotein tag is an (SP)20 tag.

[1548] 16.4 The stably transformed plant of embodiments 11-13, wherein the glycoprotein tag is an (SP)32 tag.

[1549] 16.5 The stably transformed plant of any one of embodiments 11-13, wherein the glycoprotein tag is an (SP)18 tag.

[1550] 16.6 The stably transformed plant of any one of embodiments 11-13, wherein the glycoprotein tag is a rabies glycoprotein (rgp) tag.

[1551] 16.7 The stably transformed plant of any one of embodiments 11-13, wherein the glycoprotein tag is an ANITVNITV tag.

[1552] 16.7 The stably transformed plant of any one of embodiments 11-13, wherein the glycoprotein tag is a CD45 tag.

[1553] 17. The stably transformed plant of any one of embodiments 11-13, wherein the glycoprotein tag comprises SEQ ID NO: 825, or a sequence at least 90% or 95% identical thereto.

[1554] 18. The stably transformed plant of any one of embodiments 11-13, wherein the glycoprotein tag comprises SEQ ID NO: 827, or a sequence at least 90% or 95% identical thereto.

[1555] 19. The stably transformed plant of any one of embodiments 11-18, wherein the milk protein is expressed in an amount of %, 3%, 4%, 5%, 6%, 7%, 8%, 9%, 10%, 11%, 12%, 13%, 14%, 15%, 16%, 17%, 18%, 19%, 20% or higher per total protein weight of soluble protein extractable from the plant.

[1556] 20. The stably transformed plant of any one of embodiments 11-19, wherein the milk protein is expressed at least 1, 2, 3, 4, 5, 6, 7, 8, 9, 10, 11, 12, 13, 14, 15, 16, 17, 18, 19, 20, 21, 22, 23, 24, 25, 50, 75, 100, 125, 150, 175, 200 or more fold higher than a control plant expressing only the milk protein without the glycoprotein tag.

### Embodiment Set Number 19: Reducing the Expression or Activity of One or More Proteases in a Plant Cell

[1557] 1. A plant cell for expressing recombinant milk proteins, wherein expression of one or more proteases is knocked down or knocked out, or has reduced activity in the cell.

[1558] 2. The plant cell of embodiment 1, wherein expression of the one or more proteases is knocked down or knocked out using a gene editing technology or base editing technology.

[1559] 2.1 The plant cell of embodiment 1, wherein expression of the one or more proteases is knocked down or knocked out by deleting the whole or a portion of the gene encoding the protease.

[1560] 3. The plant cell of embodiment 1, wherein expression of the one or more proteases is knocked down or knocked out using RNA interference.

[1561] 3.1 The plant cell of embodiment 1, wherein the protease activity is reduced by: (i) partial or complete deletion of the gene coding for the protease, or (ii) expression of a non-functional protease gene, or (iii) inhibition or reduction of the activity of the expressed protease protein by insertion, substitution or point mutation in the gene coding for the protease.

[1562] 4. The plant cell of any one of embodiments 1-3.1, wherein the one or more proteases is a cysteine protease, a serine protease, or an aspartyl protease.

[1563] 4.1 The plant cell of any one of embodiments 1-4, wherein the plant cell expresses a milk protein.

[1564] 4.2 The plant cell of any one of embodiments 1-4, wherein the plant cell expresses a milk protein selected from the group consisting of: α-S1 casein, α-S2 casein, β-casein, κ-casein, para-κ-casein, β-lactoglobulin, α-lactalbumin, lysozyme, lactoferrin, lactoperoxidase, and an immunoglobulin.

[1565] 4.3 The plant cell of any one of embodiments 1-4.2, wherein the milk protein lacks an animal secretion signal peptide.

[1566] 4.4 The plant cell of any one of embodiments 1-4.2, wherein the milk protein is a truncated milk protein, lacking an animal secretion signal peptide.

[1567] 4.5 The plant cell of any one of embodiments 1-4.4, wherein the protease is selected from among the proteases listed in Table 60 “Exemplary proteases and inhibitors of the same.”

[1568] 4.6 The plant cell of any one of embodiments 1-4.4, wherein the protease comprises a sequence selected from the protease sequences listed in Table 60 “Exemplary proteases and inhibitors of the same.”.

[1569] 4.7 The plant cell of any one of embodiments 1-4.4, wherein the protease comprises a sequence selected from the group consisting of SEQ ID No: 919, 920, 922, 924, 926, 928, 930, 932, and 934.

[1570] 4.8 The plant cell of any one of embodiments 1-4.8, wherein the milk protein is expressed within a fusion protein.

[1571] 5. A transgenic plant comprising the plant cell of any one of embodiments 1-4.8.

[1572] 5.1 The transgenic plant of embodiment 5, wherein the milk protein is expressed in an amount of 2%, 3%, 4%, 5%, 6%, 7%, 8%, 9%, 10%, 11%, 12%, 13%, 14%, 15%, 16%, 17%, 18%, 19%, 20% or higher per total protein weight of soluble protein extractable from the plant.

[1573] 5.2 The transgenic plant of any one of embodiments 5-5.1, wherein the milk protein is expressed at least 1, 2, 3, 4, 5, 6, 7, 8, 9, 10, 11, 12, 13, 14, 15, 16, 17, 18, 19, 20, 21, 22, 23, 24, 25, 50, 75, 100, 125, 150, 175, 200 or more fold higher than a control plant expressing only the unstructured milk protein without the protease knocked down or knocked out, or with reduced activity.

[1574] 6. A method for stably expressing a recombinant milk protein in a plant, the method comprising: (i) reducing expression of one or more proteases in the plant, (ii) transforming the plant with a plant transformation vector comprising an expression cassette encoding a recombinant milk protein or the fusion protein comprising the recombinant milk protein, (iii) growing the transformed plant under conditions wherein the recombinant milk protein is expressed in an amount of 1% or higher per total weight of soluble protein extractable from the plant.

[1575] 7. A plant cell expressing a milk protein and a heterologous protease inhibitor.

[1576] 8. The plant cell of embodiment 7, wherein the plant cell expresses a milk protein selected from the group consisting of: α-S1 casein, α-S2 casein, β-casein, κ-casein, para-κ-casein, β-lactoglobulin, α-lactalbumin, lysozyme, lactoferrin, lactoperoxidase, and an immunoglobulin.

[1577] 9 The plant cell of any one of embodiments 7-8, wherein the milk protein lacks an animal secretion signal peptide.

[1578] 10. The plant cell of any one of embodiments 7-9, wherein the milk protein is a truncated milk protein, lacking an animal secretion signal peptide.

[1579] 11. The plant cell of any one of embodiments 7-10, wherein the milk protein is expressed within a fusion protein.

[1580] 12. The plant cell of any one of embodiments 7-11, wherein the protease inhibitor is selected from the group consisting of a cysteine protease inhibitor, an aspartic protease inhibitor, a Trypsin-chymotrypsin inhibitor, and a trypsin inhibitor.

[1581] 13. The plant cell of any one of embodiments 7-12, wherein the protease inhibitor is selected from the group consisting of SICYS8, CID, BB, and API5, and KTi3.

[1582] 14 The plant cell of any one of embodiments 7-13, wherein the protease inhibitor comprises a sequence selected from the group consisting of SEQ ID No: 936, 938, 940, 942, 944.

[1583] 15. A transgenic plant comprising the plant cell of any one of embodiments 7-14.

[1584] 15.1 A transgenic plant comprising expressing the milk protein and the protease knockout or protease inhibitor expression of Table 61.

[1585] 16. The transgenic plant of embodiment 15 or 15.1, wherein the milk protein is expressed in an amount of 2%, 3%, 4%, 5%, 6%, 7%, 8%, 9%, 10%, 11%, 12%, 13%, 14%, 15%, 16%, 17%, 18%, 19%, 20% or higher per total protein weight of soluble protein extractable from the plant.

[1586] 17. The transgenic plant of any one of embodiments 15-16, wherein the milk protein is expressed at least 1, 2, 3, 4, 5, 6, 7, 8, 9, 10, 11, 12, 13, 14, 15, 16, 17, 18, 19, 20, 21, 22, 23, 24, 25, 50, 75, 100, 125, 150, 175, 200 or more fold higher than a control plant expressing only the unstructured milk protein without the heterologous protease inhibitor.

### Embodiment Set Number 20: Food Composition Comprising a Milk Protein Derived from a Fusion Protein

[1587] 1. A food composition comprising the recombinant milk protein derived from a milk protein (e.g., fusion protein) of any one of the embodiment sets above (i.e., embodiment sets 1-20).

[1588] 2. A method for making a food composition, the method comprising: expressing the milk protein (e.g. recombinant fusion protein) of any one of the embodiment sets above (i.e., embodiment sets 1-20); extracting the recombinant fusion protein from the plant; optionally, separating the first protein from the second protein; and creating a food composition using the separated milk protein or the fusion protein.

[1589] 3. The method of embodiment 2, wherein the plant stably expresses the recombinant fusion protein.

[1590] 4. The method of embodiment 2 or 3, wherein the plant expresses the recombinant fusion protein in an amount of 1% or higher per total protein weight of soluble protein extractable from the plant.

[1591] 5. The method of any one of embodiments 2-4, wherein the plant is soybean.

[1592] 6. The method of any one of embodiments 2-5, wherein the food composition comprises the first protein and the second protein.

[1593] 7. The method of embodiment 6, wherein the first protein and the second protein are separated from one another in the plant cell, prior to extraction.

[1594] 8. The method of embodiment 6, wherein the first protein and the second protein are separated after extraction, by contacting the fusion protein with an enzyme that cleaves the fusion protein.

[1595] 9. A food composition produced using the method of any one of embodiments 2-8.

[1596] 10. A food composition comprising a first or second protein, wherein the first or second protein is derived from the fusion protein of any one of the embodiment sets above.

### Embodiment Set Number 21: A Solid-Phase Protein Stabilized-Emulsion Comprising a Recombinant Casein Protein

[1597] 1. A solid phase, protein-stabilized emulsion comprising at least one recombinant casein protein selected from kappa-casein, para-kappa-casein, beta-casein, alpha-S1-casein and alpha-S2-casein; wherein the emulsion has at least one of the following characteristics: a firmness of at least 150 grams, as determined by compressing a cylindrical-shaped sample of the emulsion having a height of 3 cm and a diameter of 3 cm to a height of 1.5 cm at 5° C.; a melting point of about 35° C. to about 100° C.; or ability to stretch to at least 3 cm in length without breaking, as determined by heating a 100 gram mass of the emulsion at a temperature of about 225° C. for 4 minutes and cooling to about 90° C. and pulling with a fork placed beneath the mass.

[1598] 2. The solid phase, protein-stabilized emulsion of embodiment 1, wherein the recombinant casein protein is plant-expressed.

[1599] 3. The solid phase, protein stabilized emulsion of embodiment 1, wherein the recombinant casein protein is yeast-expressed or bacterial-expressed.

[1600] 4. The solid phase, protein stabilized emulsion of any one of embodiments 1-3, wherein the recombinant casein protein is derived from a fusion protein.

[1601] 5. The solid phase, protein stabilized emulsion of embodiment 4, wherein the fusion protein comprises a first and a second protein.

[1602] 6. The solid phase, protein stabilized emulsion of embodiment 5, wherein the first protein comprises β-Casein and the second protein comprises a milk protein.

[1603] 7. The solid phase, protein stabilized emulsion of embodiment 5, wherein the first protein comprises β-Casein and the second protein comprises a non-milk protein.

[1604] 8. The solid phase, protein stabilized emulsion of embodiment 6, wherein the milk protein is selected from the group consisting of β-lactoglobulin, casein, α-lactalbumin, lysozyme, lactoferrin, lactoperoxidase, and immunoglobulin.

[1605] 9. The solid phase, protein stabilized emulsion of embodiment 8, wherein the milk protein is β-lactoglobulin.

[1606] 10. The solid phase, protein stabilized emulsion of embodiment 8, wherein the milk protein is casein, and wherein the casein is selected from the group consisting of: α-S1 Casein, α-S2 Casein, β-Casein, κ-Casein, and para-κ-Casein.

[1607] 11. The solid phase, protein stabilized emulsion of embodiment 10, wherein the milk protein is β-Casein.

[1608] 12. The solid phase, protein-stabilized emulsion of any one of embodiments 1-11, wherein the emulsion comprises at least one lipid and at least one salt.

[1609] 13. The solid phase, protein-stabilized emulsion of any one of embodiments 1-5, wherein the emulsion comprises at least two plant-expressed casein proteins each selected from kappa-casein, para-kappa-casein, beta-casein, alpha-S1-casein and alpha-S2-casein.

[1610] 14. The solid phase, protein-stabilized emulsion of any one of embodiments 1-5, wherein the emulsion comprises at least three plant-expressed casein proteins each selected from kappa-casein, para-kappa-casein, beta-casein, alpha-S1-casein and alpha-S2-casein.

[1611] 15. The solid phase, protein-stabilized emulsion of any one of embodiments 1-14, wherein the emulsion comprises at least one additional mammalian or plant protein that is not a casein protein.

[1612] 16. The solid phase, protein-stabilized emulsion of embodiment 2, wherein the plant-expressed casein protein is expressed in a soybean plant.

[1613] 17. The solid phase, protein-stabilized emulsion of any one of embodiments 1-16, wherein the emulsion has a pH of about 5.2 to about 5.9.

[1614] 18. The solid phase, protein-stabilized emulsion of any one of embodiments 1-17, wherein the emulsion does not contain an organoleptically functional amount of beta-lactoglobulin.

[1615] 19. A solid phase, protein-stabilized emulsion comprising one plant-expressed casein protein selected from kappa-casein, para-kappa-casein, beta-casein, alpha-S1-casein, and alpha-S2-casein; wherein the emulsion does not contain any additional casein proteins; wherein the emulsion has at least one of the following characteristics: a firmness of at least 150 grams, as determined by compressing a cylindrical-shaped sample of the emulsion having a height of 3 cm and a diameter of 3 cm to a height of 1.5 cm at 5° C.; a melting point of about 35° C. to about 100° C.; or ability to stretch to at least 3 cm in length without breaking, as determined by heating a 100 gram mass of the emulsion at a temperature of about 225° C. for 4 minutes and cooling to about 90° C. and pulling with a fork placed beneath the mass.

[1616] 20. The solid phase, protein-stabilized emulsion of embodiment 19, wherein the emulsion further comprises at least one lipid and at least one salt.

[1617] 21. The solid phase, protein-stabilized emulsion of embodiment 19 or 20, wherein the plant-expressed casein protein is expressed in soybean plant.

[1618] 22. The solid phase, protein-stabilized emulsion of any one of embodiments 19-21, wherein the plant-expressed casein protein is derived from a fusion protein.

[1619] 23. The solid phase, protein stabilized-emulsion of any one of embodiments 19-22, wherein the emulsion has a pH of about 5.2 to about 5.9.

[1620] 24. The solid phase, protein-stabilized emulsion of any one of embodiments 19-23, wherein the emulsion does not contain an organoleptically functional amount of beta-lactoglobulin.

[1621] 25. A solid phase, protein-stabilized emulsion comprising: a plant-expressed casein protein selected from kappa-casein, para-kappa-casein, beta-casein, alpha-S1-casein, and alpha-S2-casein; and plant-expressed beta-lactoglobulin; wherein the ratio of the casein protein to the beta-lactoglobulin is about 8:1 to about 1:2.

[1622] 26. The solid phase, protein-stabilized emulsion of embodiment 25, wherein the emulsion has at least one of the following characteristics: a firmness of at least 150 grams, as determined by compressing a cylindrical-shaped sample of the emulsion having a height of 3 cm and a diameter of 3 cm to a height of 1.5 cm at 5° C.; a melting point of about 35° C. to about 100° C.; or ability to stretch to at least 3 cm in length without breaking, as determined by heating a 100 gram mass of the emulsion at a temperature of about 225° C. for 4 minutes and cooling to about 90° C. and pulling with a fork placed beneath the mass.

[1623] 27. The solid phase, protein-stabilized emulsion of embodiment 25 or 26, wherein the emulsion comprises at least at least one additional mammalian or plant protein that is not a casein protein.

[1624] 28. The solid phase, protein-stabilized emulsion of any one of embodiments 25-27, wherein the ratio of the casein protein to the beta-lactoglobulin is about 2:1.

[1625] 29. The solid phase, protein-stabilized emulsion of any one of embodiments 25-28, wherein the emulsion has a pH of about 5.2 to about 5.9.

[1626] 30. The solid phase, protein-stabilized emulsion of any one of embodiments 25-29, wherein the plant-expressed casein protein is derived from a fusion protein.

[1627] 31. A solid-phase protein-stabilized emulsion comprising about 8% (w/v) to about 25% (w/v) total protein, one or more lipids, and one or more salts; wherein at least 4% of the total protein comprises casein proteins selected from kappa-casein, para-kappa-casein, beta-casein, alpha-S1-casein, and alpha-S2-casein; wherein at least 20% to 100% of the casein protein is kappa casein; wherein the emulsion has at least one of the following characteristics: a firmness of at least 150 grams, as determined by compressing a cylindrical-shaped sample of the emulsion having a height of 3 cm and a diameter of 3 cm to a height of 1.5 cm at 5° C.; a melting point of about 35° C. to about 100° C.; or ability to stretch to at least 3 cm in length without breaking, as determined by heating a 100 gram mass of the emulsion at a temperature of about 225° C. for 4 minutes and cooling to about 90° C. and pulling with a fork placed beneath the mass.

[1628] 32. The solid-phase protein-stabilized emulsion of embodiment 31, wherein the kappa casein is expressed in a plant.

[1629] 33. The solid phase, protein-stabilized emulsion of any one of embodiments 31-32, wherein the kappa casein is derived from a fusion protein.

[1630] 34. The solid phase, protein-stabilized emulsion of any one of embodiments 31-33, wherein the emulsion has a pH of about 5.2 to about 5.9.

[1631] 35. The solid phase, protein-stabilized emulsion of any one of embodiments 31-34, wherein the composition comprises only one, only two, only three, or only four casein proteins selected from kappa-casein, para-kappa-casein, beta-casein, alpha-S1-casein, and alpha-S2-casein.

[1632] 36. The solid phase, protein-stabilized emulsion of any one of embodiments 31-35, wherein the emulsion does not contain an organoleptically functional amount of beta-lactoglobulin.

[1633] 37. A solid-phase protein-stabilized emulsion comprising about 8% to about 25% total protein, one or more lipids, and one or more salts; wherein at least 4% of the total protein comprises casein proteins selected from kappa-casein, para-kappa-casein, beta-casein, alpha-S1-casein, and alpha-S2-casein; wherein at least 20% to 100% of the casein protein is para-kappa casein; wherein the emulsion has at least one of the following characteristics: a firmness of at least 150 grams, as determined by compressing a cylindrical-shaped sample of the emulsion having a height of 3 cm and a diameter of 3 cm to a height of 1.5 cm at 5° C.; a melting point of about 35° C. to about 100° C.; or ability to stretch to at least 3 cm in length without breaking, as determined by heating a 100 gram mass of the emulsion at a temperature of about 225° C. for 4 minutes and cooling to about 90° C. and pulling with a fork placed beneath the mass.

[1634] 38. The solid-phase protein-stabilized emulsion of embodiment 37, wherein the para-kappa casein is expressed in a plant.

[1635] 39. The solid phase, protein-stabilized emulsion of embodiment 37 or 38, wherein the para-kappa casein is derived from a fusion protein.

[1636] 40. The solid-phase protein-stabilized emulsion of any one of embodiments 37-39 wherein the para-kappa casein is produced without the use of any enzyme that cleaves kappa-casein to para-kappa casein.

[1637] 41. The solid phase, protein-stabilized emulsion of any one of embodiments 37-40, wherein the emulsion has a pH of about 5.2 to about 5.9.

[1638] 42. The solid phase, protein-stabilized emulsion of any one of embodiments 37-41, wherein the composition comprises only one, only two, only three, or only four casein proteins selected from kappa-casein, para-kappa-casein, beta-casein, alpha-S1-casein, and alpha-S2-casein.

[1639] 43. The solid phase, protein-stabilized emulsion of any one of embodiments 37-42, wherein the emulsion does not contain an organoleptically functional amount of beta-lactoglobulin.

[1640] 44. A solid-phase protein-stabilized emulsion comprising about 8% to about 25% total protein, one or more lipids, and one or more salts; wherein at least 4% of the total protein comprises casein proteins selected from kappa-casein, para-kappa-casein, beta-casein, alpha-ST-casein, and alpha-S2-casein; wherein at least 50% to 100% of the casein protein is beta-casein; wherein the emulsion has at least one of the following characteristics: a firmness of at least 150 grams, as determined by compressing a cylindrical-shaped sample of the emulsion having a height of 3 cm and a diameter of 3 cm to a height of 1.5 cm at 5° C.; a melting point of about 35° C. to about 100° C.; or ability to stretch to at least 3 cm in length without breaking, as determined by heating a 100 gram mass of the emulsion at a temperature of about 225° C. for 4 minutes and cooling to about 90° C. and pulling with a fork placed beneath the mass.

[1641] 45. The solid-phase protein-stabilized emulsion of embodiment 44, wherein the beta-casein is expressed in a plant.

[1642] 46. The solid phase, protein-stabilized emulsion of any one of embodiments 44-45, wherein the plant-expressed casein protein is derived from a fusion protein.

[1643] 47. The solid phase, protein-stabilized emulsion of any one of embodiments 44-46, wherein the emulsion has a pH of about 5.2 to about 5.9.

[1644] 48. The solid phase, protein-stabilized emulsion of any one of embodiments 44-47, wherein the composition comprises only one, only two, only three, or only four casein proteins selected from kappa-casein, para-kappa-casein, beta-casein, alpha-S1-casein, and alpha-S2-casein.

[1645] 49. The solid phase, protein-stabilized emulsion of any one of embodiments 44-48, wherein the emulsion does not contain an organoleptically functional amount of beta-lactoglobulin.

[1646] 50. A solid-phase protein-stabilized emulsion comprising about 8% to about 25% total protein, one or more lipids, and one or more salts; wherein at least 4% of the total protein comprises casein proteins selected from kappa-casein, para-kappa-casein, beta-casein, alpha-S1-casein, and alpha-S2-casein; wherein at least 50% to 100% of the casein protein is alpha-S1-casein; wherein the emulsion has at least one of the following characteristics: a firmness of at least 150 grams, as determined by compressing a cylindrical-shaped sample of the emulsion having a height of 3 cm and a diameter of 3 cm to a height of 1.5 cm at 5° C.; a melting point of about 35° C. to about 100° C.; or ability to stretch to at least 3 cm in length without breaking, as determined by heating a 100 gram mass of the emulsion at a temperature of about 225° C. for 4 minutes and cooling to about 90° C. and pulling with a fork placed beneath the mass.

[1647] 51. The solid-phase protein-stabilized emulsion of embodiment 50, wherein the alpha-S1-casein is expressed in a plant.

[1648] 52. The solid phase, protein-stabilized emulsion of any one of embodiments 50-51, wherein the alpha-S1-casein is derived from a fusion protein.

[1649] 53. The solid phase, protein-stabilized emulsion of any one of embodiments 50-52, wherein the emulsion has a pH of about 5.2 to about 5.9.

[1650] 54. The solid phase, protein-stabilized emulsion of any one of embodiments 50-53, wherein the composition comprises only one, only two, only three, or only four casein proteins selected from kappa-casein, para-kappa-casein, beta-casein, alpha-S1-casein, and alpha-S2-casein.

[1651] 55. The solid phase, protein-stabilized emulsion of any one of embodiments 50-54, wherein the emulsion does not contain an organoleptically functional amount of beta-lactoglobulin.

[1652] 56. A solid-phase protein-stabilized emulsion comprising about 8% to about 25% total protein, one or more lipids, and one or more salts; wherein at least 4% of the total protein comprises casein proteins selected from kappa-casein, para-kappa-casein, beta-casein, alpha-S1-casein, and alpha-S2-casein; wherein at least 20% to 100% of the casein protein is alpha-S2-casein; wherein the emulsion has at least one of the following characteristics: a firmness of at least 150 grams, as determined by compressing a cylindrical-shaped sample of the emulsion having a height of 3 cm and a diameter of 3 cm to a height of 1.5 cm at 5° C.; a melting point of about 35° C. to about 100° C.; or ability to stretch to at least 3 cm in length without breaking, as determined by heating a 100 gram mass of the emulsion at a temperature of about 225° C. for 4 minutes and cooling to about 90° C. and pulling with a fork placed beneath the mass.

[1653] 57. The solid-phase protein-stabilized emulsion of embodiment 56, wherein the alpha-S2-casein is expressed in a plant.

[1654] 58. The solid phase, protein-stabilized emulsion of any one of embodiments 56-57, wherein the plant-expressed casein protein is derived from a fusion protein.

[1655] 59. The solid phase, protein-stabilized emulsion of any one of embodiments 56-58, wherein the emulsion has a pH of about 5.2 to about 5.9.

[1656] 60. The solid phase, protein-stabilized emulsion of any one of embodiments 56-59, wherein the composition comprises only one, only two, only three, or only four casein proteins selected from kappa-casein, para-kappa-casein, beta-casein, alpha-S1-casein, and alpha-S2-casein.

[1657] 61. The solid phase, protein-stabilized emulsion of any one of embodiments 56-60, wherein the emulsion does not contain an organoleptically functional amount of beta-lactoglobulin.

### Embodiment Set Number 22: Alternative Dairy Compositions Comprising One or More Recombinant Casein Proteins

[1658] 1. An alternative dairy composition comprising one or more recombinant casein proteins selected from kappa-casein, para-kappa-casein, beta-casein, alpha-S1-casein, and alpha-S2-casein; wherein the alternative dairy composition has at least one of the following characteristics: a firmness of at least 150 grams, as determined by compressing a cylindrical-shaped sample of the alternative dairy composition having a height of 3 cm and a diameter of 3 cm to a height of 1.5 cm at 5° C.; a melting point of about 35° C. to about 100° C.; or ability to stretch to at least 3 cm in length without breaking, as determined by heating a 100 gram mass of the alternative diary composition at a temperature of about 225° C. for 4 minutes and cooling to about 90° C. and pulling with a fork placed beneath the mass.

[1659] 2. The alternative dairy composition of embodiment 1, wherein the composition further comprises at least one lipid and at least one salt.

[1660] 3. The alternative dairy composition of embodiment any one of embodiments 1-2, wherein the composition further comprises at least one additional mammalian or plant protein that is not a casein protein.

[1661] 4. The alternative dairy composition of any one of embodiments 1-3, wherein the one or more recombinant casein proteins are expressed in a plant.

[1662] 5. The alternative dairy composition of embodiment 4, wherein the one or more recombinant casein proteins are expressed in a soybean plant.

[1663] 6. The alternative diary composition of any one of embodiments any one of embodiments 1-5, wherein the one or more recombinant casein proteins are derived from one or more fusion proteins.

[1664] 7. The alternative diary composition of embodiment 6, wherein one of the one or more fusion proteins comprises a first and a second protein.

[1665] 8. The alternative diary composition of embodiment 7, wherein the first protein comprises β-Casein and the second protein comprises a milk protein.

[1666] 9. The alternative diary composition of embodiment 7, wherein the first protein comprises β-Casein and the second protein comprises a non-milk protein.

[1667] 10. The alternative diary composition of embodiment 8, wherein the milk protein is selected from the group consisting of β-lactoglobulin, casein, α-lactalbumin, lysozyme, lactoferrin, lactoperoxidase, and immunoglobulin.

[1668] 11. The alternative diary composition of embodiment 8, wherein the milk protein is β-lactoglobulin.

[1669] 12. The alternative diary composition of embodiment 8, wherein the milk protein is casein, and wherein the casein is selected from the group consisting of: α-S1 Casein, α-S2 Casein, β-Casein, κ-Casein, and para-κ-Casein.

[1670] 13. The alternative diary composition of embodiment 8, wherein the milk protein is β-Casein.

[1671] 14. The alternative dairy composition of any one of embodiments 1-13, wherein the composition has a pH of about 5.2 to about 5.9.

[1672] 15. The alternative dairy composition of any one of embodiments 1-9, wherein the composition does not contain an organoleptically functional amount of beta-lactoglobulin.

[1673] 16. An alternative dairy composition comprising one or more recombinant casein proteins, one or more lipids; and one or more salts; wherein the alternative dairy composition does not contain an organoleptically functional amount of beta-lactoglobulin; wherein the alternative dairy composition has at least one of the following characteristics: a firmness of at least 150 grams, as determined by compressing a cylindrical-shaped sample of the alternative dairy composition having a height of 3 cm and a diameter of 3 cm to a height of 1.5 cm at 5° C.; a melting point of about 35° C. to about 100° C.; or ability to stretch to at least 3 cm in length without breaking, as determined by heating a 100 gram mass of the alternative diary composition at a temperature of about 225° C. for 4 minutes and cooling to about 90° C. and pulling with a fork placed beneath the mass.

[1674] 17. The alternative dairy composition of embodiment 16, wherein the composition comprises at least one additional mammalian or plant protein that is not a casein protein.

[1675] 18. The alternative dairy composition of embodiment 16 or 17, wherein the one or more recombinant casein proteins are expressed in a plant.

[1676] 19. The alternative dairy composition of claim 18, wherein the one or more recombinant casein proteins are expressed in a soybean plant.

[1677] 20. The alternative diary composition of any one of embodiments 16-19, wherein the one or more recombinant casein proteins are derived from one or more fusion proteins.

[1678] 21. The alternative dairy composition of any one of embodiments 16-20, wherein the composition has a pH of about 5.2 to about 5.9.

[1679] 22. An alternative dairy composition comprising: a recombinant casein protein selected from kappa-casein, para-kappa-casein, beta-casein, alpha-S1-casein, and alpha-S2-casein; and a recombinant beta-lactoglobulin; wherein the ratio of the casein protein to the beta-lactoglobulin is about 8:1 to about 1:2; wherein the alternative dairy composition has at least one of the following characteristics: a firmness of at least 150 grams, as determined by compressing a cylindrical-shaped sample of the alternative dairy composition having a height of 3 cm and a diameter of 3 cm to a height of 1.5 cm at 5° C.; a melting point of about 35° C. to about 100° C.; or ability to stretch to at least 3 cm in length without breaking, as determined by heating a 100 gram mass of the alternative dairy composition at a temperature of about 225° C. for 4 minutes and cooling to about 90° C. and pulling with a fork placed beneath the mass.

[1680] 23. The alternative dairy composition of embodiment 22, wherein the composition comprises at least one additional mammalian or plant protein that is not a casein protein.

[1681] 24. The alternative dairy composition of embodiment 22 or 23, wherein recombinant casein protein is expressed in a plant.

[1682] 25. The alternative dairy composition of claim 24, wherein recombinant casein protein is expressed in a soybean plant.

[1683] 26. The alternative dairy composition of any one of embodiments 22-25, wherein the recombinant casein protein is derived from a fusion protein.

[1684] 27. The alternative dairy composition of any one of embodiments 22-26, wherein the composition has a pH of about 5.2 to about 5.9.

[1685] 28. An alternative dairy composition comprising kappa-casein and essentially no para-kappa casein, wherein the alternative dairy composition has at least one of the following characteristics: a firmness of at least 150 grams, as determined by compressing a cylindrical-shaped sample of the alternative dairy composition having a height of 3 cm and a diameter of 3 cm to a height of 1.5 cm at 5° C.; a melting point of about 35° C. to about 100° C.; or ability to stretch to at least 3 cm in length without breaking, as determined by heating a 100 gram mass of the alternative diary composition at a temperature of about 225° C. for 4 minutes and cooling to about 90° C. and pulling with a fork placed beneath the mass.

[1686] 29. The alternative dairy composition of embodiment 28, wherein the composition comprises at least one additional mammalian or plant protein that is not a casein protein.

[1687] 30. The alternative dairy composition of embodiment 28 or 29, wherein the kappa casein is recombinant.

[1688] 31. The alternative dairy composition of any one of embodiments 28-30, wherein the kappa casein is expressed in a plant.

[1689] 32. The alternative dairy composition of embodiment 31, wherein the kappa casein is expressed in a soybean plant.

[1690] 33. The alternative diary composition of any one of embodiments 28-32, wherein the kappa casein is derived from a fusion protein.

[1691] 34. The alternative dairy composition of any one of embodiments 28-33, wherein the composition has a pH of about 5.2 to about 5.9.

[1692] 35. The alternative dairy composition of any one of embodiments 28-33, wherein the composition does not contain an organoleptically functional amount of beta-lactoglobulin.

[1693] 36. An alternative dairy composition comprising one to four of the milk proteins selected from kappa-casein, para-kappa-casein, beta-casein, alpha-S1-casein, and alpha-S2-casein; wherein the alternative dairy composition has at least one of the following characteristics: a firmness of at least 150 grams, as determined by compressing a cylindrical-shaped sample of the alternative dairy composition having a height of 3 cm and a diameter of 3 cm to a height of 1.5 cm at 5° C.; a melting point of about 35° C. to about 100° C.; or ability to stretch to at least 3 cm in length without breaking, as determined by heating a 100 gram mass of the alternative dairy composition at a temperature of about 225° C. for 4 minutes and cooling to about 90° C. and pulling with a fork placed beneath the mass.

[1694] 37. The alternative dairy composition of embodiment 36, wherein at least one milk protein is recombinant.

[1695] 38. The alternative dairy composition of embodiment 36, wherein the at least one milk protein is plant-expressed.

[1696] 39. The alternative dairy composition of embodiment 38, wherein the at least one milk protein is expressed in a soybean plant.

[1697] 40. The alternative dairy composition of embodiment 37, wherein the at least one milk protein is yeast- or bacterial-expressed.

[1698] 41. The alternative diary composition of any one of embodiments 36-40, wherein at least one milk protein is derived from a fusion protein.

[1699] 42. The alternative dairy composition of any one of embodiments 36-41, wherein the alternative dairy composition comprises one of the milk proteins selected from kappa-casein, para-kappa-casein, beta-casein, alpha-S1-casein, and alpha-S2-casein.

[1700] 43. The alternative dairy composition of any one of embodiments 36-41, wherein the alternative dairy composition comprises two of the milk proteins selected from kappa-casein, para-kappa-casein, beta-casein, alpha-S1-casein, and alpha-S2-casein.

[1701] 44. The alternative dairy composition of any one of embodiments 36-41, wherein the alternative dairy composition comprises three of the milk proteins selected from kappa-casein, para-kappa-casein, beta-casein, alpha-S1-casein, and alpha-S2-casein.

[1702] 45. The alternative dairy composition of any one of embodiments 36-41, wherein the alternative dairy composition comprises four of the milk proteins selected from kappa-casein, para-kappa-casein, beta-casein, alpha-S1-casein, and alpha-S2-casein.

[1703] 46. The alternative dairy composition of any one of embodiments 36-45, wherein the composition has a pH of about 5.2 to about 5.9.

[1704] 47. The alternative dairy composition of any one of embodiments 36-46, wherein the composition does not contain an organoleptically functional amount of beta-lactoglobulin.

[1705] 48. An alternative dairy composition comprising 2 to 4 casein proteins; wherein the alternative dairy composition has at least one of the following characteristics: a firmness of at least 150 grams, as determined by compressing a cylindrical-shaped sample of the alternative dairy composition having a height of 3 cm and a diameter of 3 cm to a height of 1.5 cm at 5° C.; a melting point of about 35° C. to about 100° C.; or ability to stretch to at least 3 cm in length without breaking, as determined by heating a 100 gram mass of the alternative dairy composition at a temperature of about 225° C. for 4 minutes and cooling to about 90° C. and pulling with a fork placed beneath the mass.

[1706] 49. The alternative dairy composition of embodiment 48, wherein the alternative dairy composition does not contain an organoleptically functional amount of beta-lactoglobulin.

[1707] 50. The alternative dairy composition of embodiment 48 or 49, wherein the casein proteins are selected from kappa-casein, para-kappa-casein, beta-casein, alpha-S1-casein, and alpha-S2-casein.

[1708] 51. The alternative dairy composition of any one of embodiments 48-50, wherein the composition comprises at least one lipid and at least one salt.

[1709] 52. The alternative dairy composition of any one of embodiments 48-51, wherein the composition has a pH of about 5.2 to about 5.9.

[1710] 53. The alternative diary composition of any one of embodiments 48-52, wherein at least one of the casein proteins is derived from a fusion protein.

[1711] 54. An alternative dairy composition comprising one to four plant-expressed recombinant milk proteins, wherein the alternative dairy composition comprises three or more organoleptic properties similar to a dairy composition selected from the group consisting of taste, appearance, mouthfeel, structure, texture, density, elasticity, springiness, coagulation, binding, leavening, aeration, foaming, creaminess, and emulsification.

[1712] 55. The alternative dairy composition of embodiment 54, wherein the plant-expressed milk proteins are selected from beta lactoglobulin, kappa-casein, para-kappa-casein, beta-casein, alpha-S1-casein, and alpha-S2-casein.

[1713] 56. The alternative dairy composition of embodiment 54 or 55, wherein the composition is a milk composition.

[1714] 57. The alternative dairy composition of embodiment 54 or 55, wherein the composition is a cream composition.

[1715] 58. The alternative dairy composition of embodiment 54 or 55, wherein the composition is a yogurt composition.

[1716] 59. The alternative dairy composition of embodiment 54 or 55, wherein the composition is an ice cream composition.

[1717] 60. The alternative dairy composition of embodiment 54 or 55, wherein the composition is a frozen custard composition.

[1718] 61. The alternative dairy composition of embodiment 54 or 55, wherein the composition is a frozen desert composition.

[1719] 62. The alternative dairy composition of embodiment 54 or 55, wherein the composition is a crème fraiche composition.

[1720] 63. The alternative dairy composition of embodiment 54 or 55, wherein the composition is a curd composition.

[1721] 64. The alternative dairy composition of embodiment 54 or 55, wherein the composition is a cottage cheese composition.

[1722] 65. The alternative dairy composition of embodiment 54 or 55, wherein the composition is a cream cheese composition.

[1723] 66. The alternative dairy composition of any one of embodiments 54-65, wherein at least one of the plant-expressed recombinant milk proteins is derived from a fusion protein.

[1724] 67. An alternative dairy food composition comprising: a recombinant beta-casein protein, and least one lipid, wherein the alternative dairy food composition does not comprise an organoleptically functional amount of beta-lactoglobulin.

[1725] 68. The alternative dairy food composition of embodiment 67, wherein the recombinant beta-casein protein confers on the alternative dairy food composition one or more characteristics of a dairy food product selected from the group consisting of: taste, aroma, appearance, handling, mouthfeel, density, structure, texture, elasticity, springiness, coagulation, binding, leavening, aeration, foaming, creaminess and emulsification.

[1726] 69. The alternative dairy food composition of embodiment 67 or 68, wherein the composition does not comprise any additional casein proteins.

[1727] 70. The alternative dairy food composition of embodiment 67 or 68, wherein the composition comprises at least one additional casein protein.

[1728] 71. The alternative dairy food composition of embodiment 70, wherein at least 50% by weight of the total casein protein in the composition is beta-casein.

[1729] 72. The alternative dairy food composition of embodiment 70, wherein at least 75% by weight of the total casein protein in the composition is beta-casein.

[1730] 73. The alternative dairy food composition of embodiment 70, wherein at least 90% by weight of the total casein protein in the composition is beta-casein.

[1731] 74. The alternative dairy food composition of any one of embodiments 70-73, wherein the at least one additional casein protein is selected from kappa-casein, para-kappa-casein, beta-casein, alpha-S1-casein and alpha-S2-casein.

[1732] 75. The alternative dairy food composition of any one embodiments 70-73, wherein the at least one additional casein protein is kappa-casein or para-kappa casein.

[1733] 76. The alternative dairy food composition of any one of embodiments 67-75, wherein the recombinant beta-casein is plant-expressed.

[1734] 77. The alternative dairy food composition of embodiment 76, wherein the recombinant beta-casein is expressed in a soybean.

[1735] 78. The alternative dairy food composition of any one of embodiments 70-77, wherein all caseins in the composition are plant-expressed.

[1736] 79. The alternative dairy food composition of any one of embodiments 67-78, wherein the composition comprises a fusion protein comprising the recombinant beta-casein.

[1737] 80. The alternative dairy food composition any one of embodiments 67-79, wherein the recombinant beta-casein protein confers on the alternative dairy food composition two or more characteristics of a dairy food product selected from the group consisting of: taste, aroma, appearance, handling, mouthfeel, density, structure, texture, elasticity, springiness, coagulation, binding, leavening, aeration, foaming, creaminess and emulsification.

[1738] 81. The alternative dairy food composition of any one of embodiments 67-80, wherein the composition is a milk composition, a cream composition, a yogurt composition, an ice cream composition, a frozen custard composition, a frozen dessert composition, a crème fraiche composition, a curd composition, a cottage cheese composition, or a cream cheese composition.

[1739] 82. The alternative dairy food composition of any one of embodiments 67-81, wherein the composition comprises at least one lipid and at least one salt.

[1740] 83. The alternative dairy food composition any one of embodiments 67-82, wherein the composition comprises calcium.

[1741] 84. The alternative dairy food composition of embodiment 83, wherein the composition comprises calcium at a concentration of about 0.1% to about 2% by weight.

[1742] 85. The alternative dairy food composition any one of embodiments 67-84, wherein the composition has a pH of about 4 to about 8.

### Embodiment Set Number 23: Colloidal Suspensions Comprising One or More Recombinant Casein Proteins

[1743] 1. A colloidal suspension comprising: one to four plant-expressed recombinant milk proteins, wherein the recombinant milk proteins comprise between 0.5% (w/v) to 15% (w/v) of the composition; and ash; wherein the colloidal suspension has at least one, at least two, or at least three characteristics that are substantially similar to bovine milk selected from taste, appearance, mouthfeel, structure, texture, density, elasticity, springiness, coagulation, binding, leavening, aeration, foaming, creaminess, and emulsification.

[1744] 2. The colloidal suspension of embodiment 1, wherein the plant-expressed milk proteins are selected from beta-lactoglobulin, kappa-casein, para-kappa-casein, beta-casein, alpha-S1-casein, and alpha-S2-casein.

[1745] 3. The colloidal suspension of any one of embodiments 1-2, wherein at least one of the plant-expressed recombinant milk proteins is derived from a fusion protein.

[1746] 4. A colloidal suspension comprising: one casein protein, wherein the casein protein comprises between 0.5% (w/v) to 15% (w/v); and ash; wherein the colloidal suspension has at least one, at least two, or at least three characteristics that are substantially similar to bovine milk selected from taste, appearance, mouthfeel, structure, texture, density, elasticity, springiness, coagulation, binding, leavening, aeration, foaming, creaminess, and emulsification.

[1747] 5. The colloidal suspension of embodiment 4, wherein the casein protein is selected from beta lactoglobulin, kappa-casein, para-kappa-casein, beta-casein, alpha-S1-casein, and alpha-S2-casein.

[1748] 6. The colloidal suspension of embodiment 4 or 5, wherein the casein protein is beta-casein.

[1749] 7. The colloidal suspension of any one of embodiments 4-6, wherein the casein protein is plant-expressed.

[1750] 8. The colloidal suspension of any one of embodiments 4-7, wherein the casein protein is derived from a fusion protein.

[1751] 9. A method of making an alternative dairy composition comprising processing the colloidal suspension of any one of embodiments 1-8.

[1752] 10. An alternative dairy composition produced from the method of embodiment 9.

[1753] 11. The alternative dairy composition of embodiment 10, wherein the alternative dairy composition is a cream composition, a yogurt composition, a cheese composition, an ice cream composition, a frozen custard composition, a frozen desert composition, a crème fraiche composition, a curd composition, a cottage cheese composition, or a cream cheese composition.

[1754] 12. A colloidal suspension comprising: recombinant beta-casein protein, and at least one lipid; wherein the suspension does not contain an organoleptically functional amount of beta-lactoglobulin.

[1755] 13. The colloidal suspension of embodiment 12, wherein the suspension is a non-Newtonian fluid.

[1756] 14. The colloidal suspension of embodiment 12 or 13, which is characterized as a shear thinning fluid with an apparent viscosity greater than 10 centipoise, at a shear rate of 1 sec⁻¹.

[1757] 15. The colloidal suspension of any one of embodiments 12-14, wherein the suspension is an aqueous suspension.

[1758] 16. The colloidal suspension of any one of embodiments 12-15, wherein the suspension does not comprise any additional casein proteins.

[1759] 17. The colloidal suspension of any one of embodiments 12-15, wherein the composition comprises at least one additional casein protein.

[1760] 18. The colloidal suspension of embodiment 17, wherein at least 80% by weight of the total casein protein in the composition is beta-casein.

[1761] 19. The colloidal suspension of embodiment 17 or 18, wherein the at least one additional casein protein is selected from kappa-casein, para-kappa-casein, beta-casein, alpha-S1-casein and alpha-S2-casein.

[1762] 20. The colloidal suspension of embodiment 17 or 18, wherein the at least one additional casein protein is kappa-casein or para-kappa casein.

[1763] 21. The colloidal suspension of any one of embodiments 12-20, wherein the recombinant beta-casein is plant-expressed.

[1764] 22. The colloidal suspension of any one of embodiments 12-21, wherein the composition comprises a fusion protein comprising the recombinant beta-casein.

### Embodiment Set Number 24: Cheese Compositions

[1765] 1. A cheese composition comprising para-kappa-casein produced without the use of any enzyme that cleaves kappa-casein to para-kappa casein.

[1766] 2. A substantially transparent plant-based cheese composition.

[1767] 3. A cheese composition comprising a recombinant beta-casein protein; wherein the cheese composition has at least one of the following characteristics: a firmness of at least 150 grams, as determined by compressing a cylindrical-shaped sample of the cheese composition having a height of 3 cm and a diameter of 3 cm to a height of 1.5 cm at 5° C.; a melting point of about 35° C. to about 100° C.; or ability to stretch to at least 3 cm in length without breaking, as determined by heating a 100 gram mass of the cheese composition at a temperature of about 225° C. for 4 minutes and cooling to about 90° C. and pulling with a fork placed beneath the mass.

[1768] 4. The cheese composition of embodiment 141, wherein the composition does not comprise any additional casein proteins.

[1769] 5. The cheese composition of embodiment 141, wherein the composition comprises at least one additional casein protein.

[1770] 6. The cheese composition of embodiment 143, wherein at least 80% by weight of the total casein protein in the composition is beta-casein.

[1771] 7. The cheese composition of embodiment 143, wherein at least 90% by weight of the total casein protein in the composition is beta-casein.

[1772] 8. The cheese composition of embodiment 143, wherein at least 95% by weight of the total casein protein in the composition is beta-casein.

[1773] 9. The cheese composition of embodiment 143, wherein the at least one additional casein protein is selected from kappa-casein, para-kappa-casein, beta-casein, alpha-S1-casein and alpha-S2-casein.

[1774] 10. The cheese composition of embodiment 143, wherein the at least one additional casein protein is kappa-casein.

[1775] 11. The cheese composition of embodiment 143, wherein the at least one additional casein protein is para-kappa casein.

[1776] 12. The cheese composition of any one of embodiments 141-149, wherein the recombinant beta-casein is plant-expressed.

[1777] 13. The cheese composition of embodiment 150, wherein the recombinant beta-casein is expressed in a soybean.

[1778] 14. The cheese composition of any one of embodiments 143-149, wherein all caseins in the composition are plant-expressed.

[1779] 15. The cheese composition of any one of embodiments 141-152, wherein the recombinant casein protein is derived from a fusion protein.

[1780] 16. The cheese composition of any one of embodiments 141-153, wherein the composition does not contain an organoleptically functional amount of beta-lactoglobulin.

[1781] 17. The cheese composition of any one of embodiments 141-154, wherein the composition has the ability to stretch to at least 3 cm in length without breaking, as determined by heating a 100 gram mass of the composition at a temperature of 225° C. for 4 minutes and cooling to about 90° C. and pulling with a fork placed beneath the mass.

[1782] 18. The cheese composition of any one of embodiments 141-155, wherein the composition has the ability to stretch to at least 3 cm in length without breaking, as determined by heating a 100 gram mass of the composition at a temperature of 225° C. for 4 minutes and cooling to about 90° C. and pulling with a fork placed beneath the mass; and a firmness of at least 150 grams, as determined by compressing a cylindrical-shaped sample of the cheese composition having a height of 3 cm and a diameter of 3 cm to a height of 1.5 cm at 5° C.

[1783] 19. The cheese composition of any one of embodiments 141-156, wherein the composition comprises at least one lipid and at least one salt.

[1784] 20. The cheese composition of any one of embodiments 141-157, wherein the composition comprises calcium.

[1785] 21. The cheese composition of embodiment 158, wherein the composition comprises calcium at a concentration of about 0.01% to about 2% by weight.

[1786] 22. The cheese composition of any one of embodiments 141-159, wherein the composition has a pH of about 5.2 to about 5.9.

[1787] 23. The cheese composition of any one of embodiments 141-160, wherein the composition comprises at least one organoleptic properties similar to cheese selected from the group consisting of taste, appearance, mouthfeel, structure, texture, density, elasticity, springiness, coagulation, binding, leavening, aeration, foaming, creaminess, and emulsification.

[1788] 24. A method of making the cheese composition of embodiments 141-161, the method comprising expressing the recombinant beta-casein protein in a plant, extracting the beta-casein from the plant, and combining the beta-casein with at least one lipid and/or salt.

[1789] 25. A cheese composition comprising a recombinant beta-casein protein; wherein the cheese composition has ability to stretch to at least 3 cm in length without breaking, as determined by heating a 100 gram mass of the composition at a temperature of 225° C. for 4 minutes and cooling to about 90° C. and pulling with a fork placed beneath the mass.

[1790] 26. The cheese composition of embodiment 163, wherein the composition does not comprise any additional casein proteins.

[1791] 27. The cheese composition of embodiment 163, wherein the composition comprises at least one additional casein protein, and wherein at least 80% by weight of the total casein protein in the composition is beta-casein.

[1792] 28. The cheese composition of embodiment 165, wherein the at least one additional casein protein is kappa-casein or para-kappa casein.

[1793] 29. The cheese composition of any one of embodiments 163-166, wherein the recombinant beta-casein is plant-expressed.

[1794] 30. The cheese composition of any one of embodiments 165-167, wherein the recombinant casein protein is derived from a fusion protein.

[1795] 31. The cheese composition of any one of embodiments 163-168, wherein the composition has at least one of the following characteristics: a firmness of at least 150 grams, as determined by compressing a cylindrical-shaped sample of the cheese composition having a height of 3 cm and a diameter of 3 cm to a height of 1.5 cm at 5° C.; or a melting point of about 35° C. to about 100° C.

[1796] 32. A method of making the cheese composition of any one of embodiments 163-169, the method comprising expressing the recombinant beta-casein protein in a plant, extracting the beta-casein from the plant, and combining the beta-casein with at least one lipid and/or salt.

### Embodiment Set Number 25: Fusion Proteins

[1797] 1. A recombinant fusion protein comprising: (i) a first milk protein; and (ii) a second milk protein.

[1798] 1.1 The recombinant fusion protein of embodiment 1, wherein the first milk protein and/or the second milk protein lacks an animal secretion signal peptide.

[1799] 1.2 The recombinant fusion protein of embodiment 1, wherein the first milk protein and/or the second milk protein is a truncated milk protein, lacking an animal secretion signal peptide.

[1800] 2. The recombinant fusion protein of any one embodiment 1-1.2, wherein at least one of the first milk protein and the second milk protein is α-S1 casein, α-S2 casein, β-casein, κ-casein, para-κ-casein, β-lactoglobulin, α-lactalbumin, lysozyme, lactoferrin, lactoperoxidase, serum albumin, or an immunoglobulin.

[1801] 3. The recombinant fusion protein of any one of embodiments 1-1.2, wherein at least one of the first milk protein and the second milk protein is β-lactoglobulin.

[1802] 4. The recombinant fusion protein of any one of embodiments 1-1.2, wherein at least one of the first milk protein and the second milk protein is α-S1 casein, (t-S2 casein, (3-casein, κ-casein, or para-κ-casein.

[1803] 5. The recombinant fusion protein of any one of embodiments 1-1.2, wherein: i) the first milk protein is α-S1 casein, α-S2 casein, β-casein, κ-casein, or para-κ-casein; and ii) the second milk protein is α-S1 casein, α-S2 casein, β-casein, κ-casein, or para-κ-casein.

[1804] 6. The recombinant fusion protein of any one of embodiments 1-1.2, wherein at least one of the first milk protein and the second milk protein is κ-casein and comprises the sequence of SEQ ID NO: 4, or a sequence at least 90% identical thereto.

[1805] 7. The recombinant fusion protein of any one of embodiments 1-1.2, wherein at least one of the first milk protein and the second milk protein is para-κ-casein and comprises the sequence of SEQ ID NO: 2, or a sequence at least 90% identical thereto.

[1806] 8. The recombinant fusion protein of any one of embodiments 1-1.2, wherein at least one of the first milk protein and the second milk protein is β-casein and comprises the sequence of SEQ ID NO: 6, or a sequence at least 90% identical thereto.

[1807] 9. The recombinant fusion protein of any one of embodiments 1-1.2, wherein at least one of the first milk protein and the second milk protein is α-S1 casein and comprises the sequence SEQ ID NO: 8, or a sequence at least 90% identical thereto.

[1808] 10. The recombinant fusion protein of any one of embodiments 1-1.2, wherein at least one of the first milk protein and the second milk protein is α-S2 casein and comprises the sequence SEQ ID NO: 84, or a sequence at least 90% identical thereto.

[1809] 11. The recombinant fusion protein of any one of embodiments 1-1.2, wherein the first milk protein and the second milk protein are different proteins.

[1810] 12. The recombinant fusion protein of any one of embodiments 1-1.2, wherein the first milk protein and the second milk protein are the same proteins.

[1811] 13. The recombinant fusion protein of any one of embodiments 1-12, which is plant-expressed.

[1812] 14. The recombinant fusion protein of embodiment 13, which is expressed in a soybean plant.

[1813] 15. The recombinant fusion protein of any one of embodiments 1-14, which comprises a protease cleavage site.

[1814] 16. The recombinant fusion protein of embodiment 15, wherein the protease cleavage site is a chymosin cleavage site.

[1815] 17. A nucleic acid encoding the recombinant fusion protein of any one of embodiments 1-16.

[1816] 18. The nucleic acid of embodiment 17, which is codon-optimized for expression in a plant.

[1817] 19. The nucleic acid of embodiment 18, which is codon-optimized for expression in a soybean.

[1818] 20. An expression vector comprising the nucleic acid molecule of any one of embodiments 17-19.

[1819] 21. A host cell comprising the nucleic acid of any one of claims 17-19 or the expression vector of embodiment 20.

[1820] 22. The host cell of embodiment 21, wherein the cell is a plant cell, bacterial cell, fungal cell, or mammalian cell.

[1821] 23. The host cell of embodiment 22, wherein the plant cell is a soybean cell.

[1822] 24. A plant stably transformed with the nucleic acid of any one of embodiments 17-19 or the expression vector of embodiment 20.

[1823] 25. The plant of embodiment 24, wherein the fusion protein is expressed in an amount of 1% or higher per total protein weight of soluble protein extractable from the plant.

[1824] 26. A method for making a fusion protein, the method comprising:
[1825] (a) transforming a host cell with the nucleic acid of any one of embodiments 17-19 or the expression vector of claim 20; and
[1826] (b) growing the transformed host cell under conditions wherein the fusion protein is expressed.

[1827] 27. The method of embodiment 26, which comprises co-expressing in the host cell a protein capable of forming a protein body.

[1828] 28. The method of embodiment 27, wherein the protein capable of forming a protein body is a prolamin selected from a gliadin, a hordein, a secalin, a zein, a kafirin, or an avenin.

[1829] 29. The method of embodiment 26, which comprises expressing a kinase in the host cell.

[1830] 30. The method of embodiment 26, wherein expression of one or more proteases is knocked down or knocked out in the cell.

[1831] 31. The method of any one of embodiments 26-30, wherein the fusion protein is expressed in an amount of 1% or higher per total protein weight of soluble protein extractable from the plant.

[1832] 31.1 The method of any one of embodiments 26-30, wherein the fusion protein is expressed in an amount of 2%, 3%, 4%, 5%, 6%, 7%, 8%, 9%, 10%, 11%, 12%, 13%, 14%, 15%, 16%, 17%, 18%, 19%, 20% or higher per total protein weight of soluble protein extractable from the plant.

[1833] 31.2 The method of any one of embodiments 26-31.1, wherein the fusion protein is expressed at least 1, 2, 3, 4, 5, 6, 7, 8, 9, 10, 11, 12, 13, 14, 15, 16, 17, 18, 19, 20, 21, 22, 23, 24, 25, 50, 75, 100, 125, 150, 175, 200 or more fold higher than a control plant expressing only the first or second milk protein individually.

[1834] 32. A transgenic plant comprising the recombinant fusion protein of any one of embodiments 1-16, the nucleic acid of any one of embodiments 17-20, or the expression vector of embodiment 20.

[1835] 33. The transgenic plant of embodiment 32, which is a soybean plant.

[1836] 34. A method for stably expressing the recombinant fusion protein of any one of embodiments 1-16 in a plant, the method comprising: (i) transforming a plant with a plant transformation vector comprising an expression cassette comprising a nucleic acid molecule encoding the fusion protein; and (ii) growing the transformed plant under conditions wherein the recombinant fusion protein is expressed.

[1837] 35. The method of embodiment 34, wherein the fusion protein is expressed in an amount of 1% or higher per total protein weight of soluble protein extractable from the plant.

[1838] 36. A seed processing composition, comprising the fusion protein of any one of embodiments 1-16.

[1839] 37. A food composition comprising the fusion protein of any one of embodiments 1-16.

[1840] 38. The food composition of embodiment 37, which is selected from the group consisting of cheese and processed cheese products, yogurt and fermented dairy products, directly acidified counterparts of fermented dairy products, cottage cheese dressing, frozen dairy products, frozen desserts, desserts, baked goods, toppings, icings, fillings, low-fat spreads, dairy-based dry mixes, soups, sauces, salad dressing, geriatric nutrition, creams and creamers, analog dairy products, follow-up formula, baby formula, infant formula, milk, dairy beverages, acid dairy drinks, smoothies, milk tea, butter, margarine, butter alternatives, growing up milks, low-lactose products and beverages, medical and clinical nutrition products, protein/nutrition bar applications, sports beverages, confections, meat products, analog meat products, meal replacement beverages, weight management food and beverages, cultured buttermilk, sour cream, yogurt, skyr, leben, lassi, kefir, powder containing a milk protein, and low-lactose products.

[1841] 39. The food composition of embodiment 37, which is a cheese composition.

[1842] 40. The food composition of embodiment 39, wherein the cheese composition has the ability to stretch to at least 3 cm in length without breaking, as determined by heating a 100 gram mass of the composition at a temperature of 225° C. for 4 minutes and cooling to about 90° C. and pulling with a fork placed beneath the mass.

[1843] 41. The food composition of embodiment 39 or 40, comprising a total amount of casein protein; wherein about 32% to 100% by weight of the total amount of casein protein in the food composition is beta-casein.

[1844] 42. A method of making a food composition, comprising combining the fusion protein of any one of embodiments 1-16 into a food composition.

[1845] 43. An alternative dairy food composition comprising: i) the recombinant fusion protein of any one of embodiments 1-16; and ii) at least one lipid, wherein the recombinant fusion protein confers on the alternative dairy food composition one or more characteristics of a dairy food product selected from the group consisting of: taste, aroma, appearance, handling, mouthfeel, density, structure, texture, elasticity, springiness, coagulation, binding, leavening, aeration, foaming, creaminess and emulsification.

[1846] 44. The alternative dairy food composition of embodiment 43, wherein the alternative dairy food composition does not comprise any other milk proteins.

[1847] 45. The alternative dairy food composition of embodiment 43 or 44, which comprises calcium at a concentration of about 0.01 to about 2% by weight.

[1848] 46. The alternative diary food composition of any one of embodiments 43-45, comprising a total amount of casein protein; wherein about 32% to 100% by weight of the total amount of casein protein in the food composition is beta-casein.

[1849] 47. The alternative diary food composition of any one of embodiments 43-46, wherein the composition has a pH of about 5.2 to about 5.9.

[1850] 48. The alternative diary food composition of any one of embodiments 43-47, which is selected from the group consisting of cheese and processed cheese products, yogurt and fermented dairy products, directly acidified counterparts of fermented dairy products, cottage cheese dressing, frozen dairy products, frozen desserts, desserts, baked goods, toppings, icings, fillings, low-fat spreads, dairy-based dry mixes, soups, sauces, salad dressing, geriatric nutrition, creams and creamers, analog dairy products, follow-up formula, baby formula, infant formula, milk, dairy beverages, acid dairy drinks, smoothies, milk tea, butter, margarine, butter alternatives, growing up milks, low-lactose products and beverages, medical and clinical nutrition products, protein/nutrition bar applications, sports beverages, confections, meat products, analog meat products, meal replacement beverages, weight management food and beverages, cultured buttermilk, sour cream, yogurt, skyr, leben, lassi, kefir, powder containing a milk protein, and low-lactose products.

[1851] 49. The alternative diary food composition of any one of embodiments 43-47, which is a cheese composition.

[1852] 50. A solid phase, protein-stabilized emulsion comprising the fusion protein of any one of embodiments 1-16, wherein the emulsion has the ability to stretch to at least 3 cm in length without breaking, as determined by heating a 100 gram mass of the emulsion to a temperature of about 225° C. for 4 minutes and cooling to about 90° C. and pulling with a fork placed beneath the mass.

[1853] 51. A colloidal suspension comprising the fusion protein of any one of embodiments 1-16; wherein the colloidal suspension has at least one, at least two, or at least three characteristics that are substantially similar to bovine milk selected from taste, appearance, mouthfeel, structure, texture, density, elasticity, springiness, coagulation, binding, leavening, aeration, foaming, creaminess, and emulsification.

### Embodiment Set Number 26: Agronomic Yield and Testa Color

[1854] 1. A method for increasing yield of recombinant milk protein production per acre in soybean, comprising: providing to a locus a plurality of transgenic soybean seed, wherein the transgenic soybean seed comprise a recombinant DNA construct encoding a fusion protein comprising at least one milk protein, and wherein the plurality of transgenic soybean seed produce in the aggregate at least 2, 4, 6, 6.3, 8, 10, 12, 14, 16, 18, 20, 22, 24, 26, 28, 30, 32, 34, 36, 38, 40, 42, 44, 46, 48, or 50, pounds of recombinant milk protein per acre.

[1855] 2. The method of embodiment 1, wherein the plurality of transgenic soybean seed produce in the aggregate at least 60, 70, 80, 90, 100, 150, 200, 250, 300, 350, 400, 450, 500, 550, 600, 650, 700, 750, 800, or 840 pounds of recombinant milk protein per acre

[1856] 3. A method for increasing yield of recombinant milk protein production per bushel in soybean, comprising: providing to a locus a plurality of transgenic soybean seed, wherein the transgenic soybean seed comprise a recombinant DNA construct encoding a fusion protein comprising at least one milk protein, and wherein the plurality of transgenic soybean seed produce in the aggregate at least 0.21 pounds of recombinant milk protein per bushel.

[1857] 4. The method of embodiment 3, wherein the plurality of transgenic soybean seed produce in the aggregate at least 0.5, 1.0, 1.5, 2.0, 2.5, 3.0, 3.5, 4.0, 4.5, 5.0, 5.5, 6.0, 6.5, 7.0, 7.5, 8.0, 8.5, 9.0, 9.5, 10.0, or 10.5 pounds of recombinant milk protein per bushel.

[1858] 5. A method for increasing the amount of recombinant milk protein produced per soybean seed, comprising: providing to a locus a transgenic soybean seed, wherein the transgenic soybean seed comprises a recombinant DNA construct encoding a fusion protein comprising at least one milk protein, and wherein the transgenic soybean seed produces at least 0.5 mg of recombinant milk protein per soybean seed.

[1859] 6. The method of embodiment 5, wherein the transgenic soybean seed produces at least 0.7, 1.0, 2.0, 3.0, 4.0, 5.0, 6.0, 7.0, 8.0, 9.0, 10.0, 11.0, 12.0, 13.0, 14.0, 15.0, 16.0, 17.0, 18.0, 19.0, 20.0, 21.0, 22.0, 23.0, 24.0, 25.0, 26.0, or 26.5 mg of recombinant milk protein per soybean seed.

[1860] 7. A method for increasing yield of recombinant milk protein production per acre in soybean, comprising:
[1861] a. providing to a locus a plurality of transgenic soybean seed at a density of at least about 50,000 seeds per acre; and
[1862] b. growing the plurality of transgenic soybean seed until plant maturity and fruit pod formation,
[1863] wherein each transgenic soybean seed in the mature fruit pod produces at least 0.5 mg of recombinant milk protein per soybean seed.

[1864] 7.1 The method of any one of embodiments 1-7, wherein the at least one milk protein in the fusion protein lacks an animal secretion signal peptide.

[1865] 7.2 The method of any one of embodiments 1-7, wherein the at least one milk protein in the fusion protein is a truncated milk protein, lacking an animal secretion signal peptide.

[1866] 8. A method for increasing yield of recombinant milk protein production per acre in soybean, comprising: providing to a locus a plurality of genetically modified soybean seed, wherein the plurality of genetically modified soybean seed produce in the aggregate at least 2 or 6.3 pounds of recombinant milk protein per acre.

[1867] 9. The method of embodiment 8, wherein the plurality of genetically modified soybean seed produce in the aggregate at least 6.3, 10, 20, 30, 40, 50, 60, 70, 80, 90, 100, 150, 200, 250, 300, 350, 400, 450, 500, 550, 600, 650, 700, 750, 800, or 840 pounds of recombinant milk protein per acre

[1868] 10. A method for increasing yield of recombinant milk protein production per bushel in soybean, comprising: providing to a locus a plurality of genetically modified soybean seed, wherein the plurality of genetically modified soybean seed produce in the aggregate at least 0.21 pounds of recombinant milk protein per bushel.

[1869] 11. The method of embodiment 10, wherein the plurality of genetically modified soybean seed produce in the aggregate at least 0.5, 1.0, 1.5, 2.0, 2.5, 3.0, 3.5, 4.0, 4.5, 5.0, 5.5, 6.0, 6.5, 7.0, 7.5, 8.0, 8.5, 9.0, 9.5, 10.0, or 10.5 pounds of recombinant milk protein per bushel.

[1870] 12. A method for increasing the amount of recombinant milk protein produced per soybean seed, comprising: providing to a locus a genetically modified soybean seed, wherein the genetically modified soybean seed produces at least 0.5 mg of recombinant milk protein per soybean seed.

[1871] 13. The method of embodiment 12, wherein the genetically modified soybean seed produces at least 0.7, 1.0, 2.0, 3.0, 4.0, 5.0, 6.0, 7.0, 8.0, 9.0, 10.0, 11.0, 12.0, 13.0, 14.0, 15.0, 16.0, 17.0, 18.0, 19.0, 20.0, 21.0, 22.0, 23.0, 24.0, 25.0, 26.0, or 26.5 mg of recombinant milk protein per soybean seed.

[1872] 14. A method for increasing yield of recombinant milk protein production per acre in soybean, comprising:
[1873] a. providing to a locus a plurality of genetically modified soybean seed at a density of at least about 50,000 seeds per acre; and
[1874] b. growing the plurality of genetically modified soybean seed until plant maturity and fruit pod formation,
   wherein each genetically modified soybean seed in the mature fruit pod produces at least 0.5 mg of recombinant milk protein per soybean seed.

[1875] 15. The method of any one of embodiments 8 to 14, wherein the genetically modified soybean seed comprises at least one of the following genetic modifications:
[1876] a. a recombinant DNA construct encoding a fusion protein comprising at least one milk protein;
[1877] b. a recombinant DNA construct encoding a protein capable of forming a protein body;
[1878] c. a recombinant DNA construct encoding a prolamin;
[1879] d. a first recombinant DNA construct encoding a milk protein and a second recombinant DNA construct encoding a prolamin;
[1880] e. a recombinant DNA construct encoding a milk protein that has been modified to have an amino acid sequence different from the native animal expressed milk protein;
[1881] f. a recombinant DNA construct encoding a milk protein that has been modified to promote addition of a post-translational modification;
[1882] g. a recombinant DNA construct encoding a milk protein that has been modified to prevent addition of a post-translational modification;
[1883] h. a recombinant DNA construct encoding an enzyme that alters post-translational modification of protein;
[1884] i. a recombinant DNA construct encoding an enzyme capable of modifying a protein;
[1885] j. a recombinant DNA construct encoding a kinase; or
[1886] k. a genetic modification that modulates the expression of a plant protease.

[1887] 16. A method for increasing yield of recombinant milk protein production per acre in a plant, comprising: providing to a locus a plurality of transgenic plant seed, wherein the transgenic plant seed comprise a recombinant DNA construct encoding a fusion protein comprising at least one milk protein, and wherein the plurality of transgenic plant seed produce in the aggregate at least 2 or 6.3 pounds of recombinant milk protein per acre.

[1888] 17. The method of embodiment 16, wherein the plurality of transgenic plant seed produce in the aggregate at least 6.3, 10, 20, 30, 40, 50, 60, 70, 80, 90, 100, 150, 200, 250, 300, 350, 400, 450, 500, 550, 600, 650, 700, 750, 800, or 840 pounds of recombinant milk protein per acre

[1889] 18. A method for increasing yield of recombinant milk protein production per acre in a plant, comprising: providing to a locus a plurality of genetically modified plant seed, wherein the plurality of genetically modified plant seed produce in the aggregate at least 2 pounds of recombinant milk protein per acre.

[1890] 19. The method of embodiment 18, wherein the plurality of genetically modified plant seed produce in the aggregate at least 6.3, 10, 20, 30, 40, 50, 60, 70, 80, 90, 100, 150, 200, 250, 300, 350, 400, 450, 500, 550, 600, 650, 700, 750, 800, or 840 pounds of recombinant milk protein per acre

[1891] 20. The method of any one of embodiments 16 to 19, wherein the plant seed comprises at least one of the following genetic modifications:
[1892] a. a recombinant DNA construct encoding a fusion protein comprising at least one milk protein;
[1893] b. a recombinant DNA construct encoding a protein capable of forming a protein body;
[1894] c. a recombinant DNA construct encoding a prolamin;
[1895] d. a first recombinant DNA construct encoding a milk protein and a second recombinant DNA construct encoding a prolamin;
[1896] e. a recombinant DNA construct encoding a milk protein that has been modified to have an amino acid sequence different from the native animal expressed milk protein;
[1897] f. a recombinant DNA construct encoding a milk protein that has been modified to promote addition of a post-translational modification;
[1898] g. a recombinant DNA construct encoding a milk protein that has been modified to prevent addition of a post-translational modification;
[1899] h. a recombinant DNA construct encoding an enzyme that alters post-translational modification of protein;
[1900] i. a recombinant DNA construct encoding an enzyme capable of modifying a protein;
[1901] j. a recombinant DNA construct encoding a kinase; or
[1902] k. a genetic modification that modulates the expression of a plant protease.

[1903] 21. The method of any one of embodiments 16 to 19, wherein the plant is a soybean.

[1904] 22. A plant seed comprising:
[1905] a) a recombinant mammalian milk protein selected from the group consisting of: α-S1 casein, α-S2 casein, β-casein, κ-casein, para-κ-casein, and β-lactoglobulin.

[1906] 22.1 The plant seed/method of any one of embodiments 1-22, wherein the plant seed comprises a testa with an exogenously-induced color.

[1907] 22.1.1 The plant seed of any one of embodiments 22-22.1, wherein the recombinant milk protein lacks an animal secretion signal peptide.

[1908] 22.1.2 The plant seed of any one of embodiments 22-22.1, wherein the recombinant milk protein is a truncated milk protein, lacking an animal secretion signal peptide.

[1909] 22.2 The plant seed of embodiment 22.1, wherein the exogenously-induced color is not present in the seed endosperm.

[1910] 22.3 The plant seed of any one of embodiments 22.1-22.2, wherein the exogenously-induced color is only present in the testa.

[1911] 22.3.1 The plant seed of any one of embodiments 22.1-22.3, wherein the exogenously-induced color is encoded in a genetic modification.

[1912] 22.32 The plant seed of any one of embodiments 22.1 to 22.3, wherein the exogenously-induced color occurs due to a genetic modification in a metabolic pathway selected from the group consisting of flavonoids, carotenoids, and alkaloids.

[1913] 22.4 The plant seed of any one of embodiments 22.1 to 22.3, wherein the exogenously-induced color occurs due to a genetic modification in the anthocyanin metabolic pathway.

[1914] 22.5 The plant seed of any one of embodiments 22.1 to 22.4, wherein the genetic modification comprises overexpression of an R2R3 or bHLH transcription factor.

[1915] 22.5.1 The plant seed of embodiment 22.5, wherein the R2R3 or bHLH transcription factor is selected from the group consisting of: AtMybA, MoroMybA, VvMybA, PamMybA.1, PamMybA.5, and GmMYBA2, and GmTT8a.

[1916] 22.5.2 The plant seed of embodiment 22.5, wherein the R2R3 transcription factor is selected from the group consisting of: AT1G56650, KT992776, JX470201, KT992773, KT992775, Glyma02g16670, and Glyma09g36983.

[1917] 22.6 The plant seed of any one of embodiments 22.1-22.5.2, wherein the genetic modification comprises over-expression of a Chalcone Synthase (CHS) protein.

[1918] 22.7 The plant seed of embodiment 22.6, wherein a re-coded native CHS protein is expressed.

[1919] 22.7.1 The plant seed of embodiment 22.7, wherein the re-coded native CHS protein is encoded by a sequence selected from the group consisting of: SEQ ID NO: 887, SEQ ID NO: 888, and SEQ ID NO: 889.

[1920] 22.8 The plant seed of embodiment 22.6 wherein an exogenous CHS protein is expressed.

[1921] 22.8.1 The plant seed of embodiment 22.8, wherein the exogenous CHS protein is encoded by a sequence selected from the group consisting of AT5G13930, AT5G13930, AT5G13930, AB030004.

[1922] 22.8.2 The plant seed of embodiment 22.8, wherein the exogenous CHS protein is encoded by a sequence selected from the group consisting of: SEQ ID NO: 890, SEQ ID NO: 891, SEQ ID NO: 892, SEQ ID NO: 893, SEQ ID NO: 894, and SEQ ID NO: 895.

[1923] 22.8.3 The plant seed of embodiment 22.8, wherein the exogenous CHS protein is recoded.

[1924] 22.9 The plant seed of embodiment 22.6 or 22.7, wherein the promoter operably linked to the gene encoding for the CHS protein comprises is expressed with a testa specific promoter.

[1925] 22.10 The plant seed of any one of embodiments 22.5-22.7, wherein the R2R3 or bHLH transcription factor is overexpressed with a testa specific promoter.

[1926] 22.11 The plant seed of embodiment 22.9 or 22.10, wherein the testa promoter is selected from the promoters of any one of Glyma11g03010, Glyma01g42350, Glyma03g40310, Glyma01g26230, Glyma14g07940, Glyma06g00680, Glyma07g28940, Glyma08g19580, Glyma06g02500, Glyma14g34480, Glyma09g30910, or Glyma06g42780.

[1927] 22.11.1 The plant seed of any one of embodiments 22.3.1-22.11 wherein the genetic modification comprises expression of an R2R3 transcription factor and a bHLH transcription factor.

[1928] 22.11.2 The plant seed of any one of embodiments 22.3.1-22.11 wherein the genetic modification comprises expression of an R2R3 transcription factor and a recoded native or exogenous CHS.

[1929] 22.11.3 The plant seed of any one of embodiments 22.3.1-22.11 wherein the genetic modification comprises expression of an R2R3 transcription factor and a bHLH transcription factor and expression of a recoded native or exogenous CHS.

[1930] 22.12. The plant seed of any one of embodiments 22-22.11.3, wherein the recombinant mammalian milk protein is expressed in a fusion with a fusion partner.

[1931] 22.13. The plant seed of any one of embodiments 22.12, wherein the fusion protein is a milk protein.

[1932] 22.14. The plant seed of embodiment 22.13, wherein the fusion partner is selected from the group consisting of: α-S1 casein, α-S2 casein, β-casein, κ-casein, para-κ-casein, and β-lactoglobulin.

[1933] 22.15 The plant seed of any one of embodiments 21-22.14, wherein the mammalian milk protein is encoded by an exogenous nucleic acid.

[1934] 22.15.1 The plant seed of embodiment 22.15, wherein the exogenous nucleic acid and the genetic modification are within the same integrated T-DNA.

[1935] 22.15.2 The plant seed of embodiment 22.15, wherein the exogenous nucleic acid and the genetic modification are on different integrated T-DNAs.

[1936] 22.16 The plant seed of embodiment 22.15, wherein the exogenous nucleic acid and the genetic modification are located within 10, 9, 8, 7, 6, 5, 4, 3, 2, 1, 0.5, or 0.1 centimorgans of each other in the genome of the plant.

[1937] 22.17 The plant seed of embodiment 22.15, wherein the exogenous nucleic acid and the genetic modification are located within 3 kb, 2 kb, 1 kb, 500 bp, 250 bp or 100 bp of each other in the genome of the plant.

[1938] 22.18 The plant seed of any one of embodiments 21-22.17, wherein the plant seed comprises a balancing genetic modification, that reduces the plant seed's use of one or more amino acids present in the recombinant mammalian milk protein.

[1939] 22.19 The plant seed of embodiment 22.18, wherein the balancing genetic modification is a downregulation of a protein selected from the group consisting of 0-conglycinin α, β-conglycinin α′, β-conglycinin R, Cysteine Protease, Glycinin 1, Glycinin 2, Glycinin 3, Glycinin 4, Glycinin 5, Glycinin 7, Kunitz-type Trypsin inhibitor, and lectin.

[1940] 22.19.1 The plant seed of embodiment 22.18, wherein the balancing genetic modification comprises a genomic modification of a promoter sequence of a gene selected from the group consisting of β-conglycinin α, β-conglycinin α′, β-conglycinin R, 4 Beta-Conglycinin, Cysteine Protease, Glycinin 1, Glycinin 2, Glycinin 3, Glycinin 4, Glycinin 5, Glycinin 6, Glycinin 7, Kunitz Trypsin inhibitor 3, 3 Lipoxygenase, and lectin.

[1941] 22.19.2 The plant seed of embodiment 22.19.1, wherein the promoter is selected from the group consisting of: Glycinin1, Glycinin 4, Beta-Conglycinin α′ subunit, and Kunitz Tripsin Inhibitor 3.

[1942] 22.20 The plant seed of embodiment 22.18 or 22.19, wherein the balancing genetic modification, comprises a partial deletion, sequence insertion, or sequence replacement in the gene encoding for a protein selected from the group consisting of β-conglycinin α, 0-conglycinin α′, β-conglycinin R, Cysteine Protease, Glycinin 1, Glycinin 2, Glycinin 3, Glycinin 4, Glycinin 5, Glycinin 7, Kunitz-type Trypsin inhibitor, and lectin.

[1943] 22.20 The plant seed of embodiment 22.18 or 22.19, wherein the balancing genetic modification, comprises a partial deletion, sequence insertion, or sequence replacement in the promoter ofthe gene encoding for a protein selected from the group consisting of β-conglycinin α, β-conglycinin α′, β-conglycinin R, Cysteine Protease, Glycinin 1, Glycinin 2, Glycinin 3, Glycinin 4, Glycinin 5, Glycinin 7, Kunitz-type Trypsin inhibitor, and lectin.

[1944] 22.21 The plant seed of any one of embodiments 21-22.20 wherein at least one of the genetic modifications is made using a gene-editing technology.

[1945] 22.22 The plant seed of embodiment 22.21, wherein the gene-editing technology is a CRISPR/Cas system.

[1946] 22.23 The plant seed of embodiment 22.22, wherein the CRISPR system comprises a nucleic acid molecule and an enzymatic protein, wherein the nucleic acid molecule is a guide RNA (gRNA) molecule and the enzymatic protein is a Cas protein or Cas ortholog.

[1947] 22.24 A guide nucleic acid comprising a spacer sequence that is complementary to a sequence of a promoter of a gene selected from the group consisting of Glycinin1, Glycinin 4, Beta-Conglycinin α′ subunit, and Kunitz Tripsin Inhibitor 3.

[1948] 22.25 A guide nucleic acid comprising a spacer sequence that is complementary to a sequence of a gene selected from the group consisting of: β-conglycinin α, β-conglycinin α′, β-conglycinin R, 4 Beta-Conglycinin, Cysteine Protease, Glycinin 1, Glycinin 2, Glycinin 3, Glycinin 4, Glycinin 5, Glycinin 6, Glycinin 7, Kunitz Trypsin inhibitor 3, 3 Lipoxygenase, and lectin.

### Embodiment Set Number 27: Testa Color

[1949] 1. A plant seed, wherein the plant seed comprises a testa with an exogenously-induced color.

[1950] 2. The plant seed of embodiment 1, wherein the exogenously-induced color is not present in the seed endosperm.

[1951] 3. The plant seed of any one of embodiments 1-2, wherein the exogenously-induced color is only present in the testa.

[1952] 4. The plant seed of any one of embodiments 1-3, wherein the exogenously-induced color is encoded in a genetic modification.

[1953] 5. The plant seed of any one of embodiments 1-3, wherein the exogenously-induced color occurs due to a genetic modification in a metabolic pathway selected from the group consisting of flavonoids, carotenoids, and alkaloids.

[1954] 6. The plant seed of any one of embodiments 1-3, wherein the exogenously-induced color occurs due to a genetic modification in the anthocyanin metabolic pathway.

[1955] 7. The plant seed of any one of embodiments 1-6, wherein the genetic modification comprises overexpression of an R2R3 or bHLH transcription factor.

[1956] 8. The plant seed of embodiment 7, wherein the R2R3 or bHLH transcription factor is selected from the group consisting of: AtMybA, MoroMybA, VvMybA, PamMybA.1, PamMybA.5, and GmMYBA2, and GmTT8a.

[1957] 9. The plant seed of embodiment 7, wherein the R2R3 transcription factor is selected from the group consisting of: AT1G56650, KT992776, JX470201, KT992773, KT992775, Glyma02g16670, and Glyma09g36983.

[1958] 10. The plant seed of any one of embodiments 1-9, wherein the genetic modification comprises over-expression of a Chalcone Synthase (CHS) protein.

[1959] 11. The plant seed of embodiment 10, wherein a re-coded native CHS protein is expressed.

[1960] 12. The plant seed of embodiment 11, wherein the re-coded native CHS protein is encoded by a sequence selected from the group consisting of: SEQ ID NO: 887, SEQ ID NO: 888, and SEQ ID NO: 889.

[1961] 13. The plant seed of embodiment 10, wherein an exogenous CHS protein is expressed.

[1962] 14. The plant seed of embodiment 13, wherein the exogenous CHS protein is encoded by a sequence selected from the group consisting of AT5G13930, AT5G13930, AT5G13930, AB030004.

[1963] 15. The plant seed of embodiment 13, wherein the exogenous CHS protein is encoded by a sequence selected from the group consisting of: SEQ ID NO: 890, SEQ ID NO: 891, SEQ ID NO: 892, SEQ ID NO: 893, SEQ ID NO: 894, and SEQ ID NO: 895.

[1964] 16. The plant seed of embodiment 13, wherein the exogenous CHS protein is recoded.

[1965] 17. The plant seed of any one of embodiments 10-16, wherein the promoter operably linked to the gene encoding for the CHS protein comprises comprises a testa specific promoter.

[1966] 18. The plant seed of any one of embodiments 7-17, wherein the R2R3 or bHLH transcription factor is overexpressed with a testa specific promoter.

[1967] 19. The plant seed of embodiment 17 or 18, wherein the testa promoter is selected from the promoters of any one of Glymal1g03010, Glyma01g42350, Glyma03g40310, Glyma01g26230, Glyma14g07940, Glyma06g00680, Glyma07g28940, Glyma08g19580, Glyma06g02500, Glyma14g34480, Glyma09g30910, or Glyma06g42780.

[1968] 20. The plant seed of any one of embodiments 4-19, wherein the genetic modification comprises expression of an R2R3 transcription factor and a bHLH transcription factor.

[1969] 21. The plant seed of any one of embodiments 4-19, wherein the genetic modification comprises expression of an R2R3 transcription factor and a recoded native or exogenous CHS.

[1970] 22. The plant seed of any one of embodiments 4-19, wherein the genetic modification comprises expression of an R2R3 transcription factor and a bHLH transcription factor and expression of a recoded native or exogenous CHS.

### Embodiment Set Number 28: Compositions of Interest (Ratio)

[1971] 23. A composition comprising:
[1972] a) a recombinant mammalian milk protein;
[1973] b) a second protein selected from the group consisting of 7S globulin glycinin, 11S globulin, Lipoxygenase, and Kunitz Trypsin Inhibitor;

[1974] wherein the milk protein and second protein are present at a w/w ratio of at least 1:20, 1:19, 1:18, 1:17, 1:16, 1:15, 1:14, 1:13, 1:12, 1:11, 1:10, 1:9, 1:8, 1:7, 1:6, 1:5, 1:4, 1:3, 1:2, or 1:1.23.1 The composition of embodiment 23, wherein the recombinant mammalian milk protein lacks an animal secretion signal peptide.

[1975] 23.2 The composition of embodiment 23, wherein the recombinant mammalian milk protein is a truncated milk protein, lacking an animal secretion signal peptide.

[1976] 24. The composition of any one of embodiments 23-23.2, wherein the milk protein is selected from the group consisting of α-S1 casein, α-S2 casein, β-casein, κ-casein, para-κ-casein, and β-lactoglobulin.

[1977] 24.1 The composition of any one of embodiments 23-23.2, wherein the milk protein is selected from the group consisting of: α-S1 casein, α-S2 casein, β-casein, κ-casein, para-κ-casein, β-lactoglobulin, α-lactalbumin, lysozyme, lactoferrin, lactoperoxidase, serum albumin, and an immunoglobulin

[1978] 25. The composition of any one of embodiments 23-24.1, wherein the composition does not have lactose.

[1979] 25.1 The composition of any one of embodiments 23-25, wherein said composition does not have one or more proteins present in cow milk.

[1980] 25.2 The composition of embodiment 25.1, wherein the one or more proteins present in cow milk are selected from the group consisting of α-S1 casein, α-S2 casein, (3-casein, κ-casein, para-κ-casein, β-lactoglobulin, α-lactalbumin, lysozyme, lactoferrin, lactoperoxidase, serum albumin, and an immunoglobulin.

[1981] 25.3 The composition of embodiment 25.1, wherein the one or more proteins present in cow milk are selected from the group consisting of α-lactalbumin, lysozyme, lactoferrin, lactoperoxidase, serum albumin, and an immunoglobulin.

[1982] 26. The composition of any one of embodiments 23-25.3, further comprising: c) chlorophyll.

[1983] 27. The composition of any one of embodiments 23-26, wherein the recombinant milk protein is expressed in a fusion protein with a fusion partner

[1984] 28. The composition of embodiment 27, wherein the fusion partner is a milk protein.

[1985] 29. The composition of embodiment 28, wherein the fusion partner is selected from the group consisting of: α-S1 casein, α-S2 casein, β-casein, κ-casein, para-κ-casein, and β-lactoglobulin.

[1986] 29.1 The composition of embodiment 28, wherein the fusion partner is selected from the group consisting of: α-S1 casein, α-S2 casein, β-casein, κ-casein, para-κ-casein, β-lactoglobulin, α-lactalbumin, lysozyme, lactoferrin, lactoperoxidase, serum albumin, and an immunoglobulin

[1987] 30. The composition of embodiment 27, wherein the fusion protein is selected from the group consisting of:
[1988] a) Beta-casein-AlphaS1-casein-AlphaS1-casein-Beta-casein;
[1989] b) Beta-casein-Beta-casein-Kappa-casein-Beta-lactoglobulin;
[1990] c) Beta-casein-Beta-casein-Beta-casein-Beta-casein; and
[1991] d) Gamma-Zein-Beta-casein.

[1992] 31. The composition of any one of any one of embodiments 23-29.1, wherein the composition is a coffee creamer, a cheese, a substitute milk product.

[1993] 31. The composition of any one of embodiments 23-29.1, further comprising: a nucleic acid encoding glycinin.

[1994] 32. The composition of any one of embodiment 23, further comprising: a nucleic acid encoding lipoxygenase.

[1995] 33. The composition of embodiment 23, further comprising: a nucleic acid encoding kunitz trypsin inhibitor.

[1996] 33.5 The composition of embodiment 23, wherein the recombinant mammalian milk protein comprises reduced phosphorylation as compared to a corresponding mammalian milk protein in a bovine as determined by mass spectrometry.

[1997] 34. The composition of any one of embodiments 23-33, wherein the composition does not have a fatty acid profile comprising:

| | |
|---|---|
| palmitic acid (16:0) | about 10% |
| stearic acid (18:0) | about 4% |
| oleic acid (18:1) | about 18% |
| linoleic acid (18:2) | about 55% |
| linolenic acid (18:3) | about 13% |

wherein the fatty acid profile represents (wt/wt) percent over total fatty acids.

[1998] 35. The composition of any one of embodiments 23-33, wherein the composition has a fatty acid profile comprising: palmitic acid (16:0) about 23%-32%

| | |
|---|---|
| palmitic acid (16:0) | about 23%-32% |

wherein the fatty acid profile represents (wt/wt) percent over total fatty acids.

[1999] 35.1 The composition of any one of embodiments 23-33, wherein the composition has a fatty acid profile comprising: palmitic acid (16:0) about 13%-42%

| | |
|---|---|
| palmitic acid (16:0) | about 13%-42% |

wherein the fatty acid profile represents (wt/wt) percent over total fatty acids.

[2000] 36. The composition of any one of embodiments 23-35, wherein the composition has a fatty acid profile comprising:

| | |
|---|---|
| stearic acid (18:0) | about 21%-26% |

wherein the fatty acid profile represents (wt/wt) percent over total fatty acids.

[2001] 36.1 The composition of any one of embodiments 23-35, wherein the composition has a fatty acid profile comprising:

| | |
|---|---|
| stearic acid (18:0) | about 11%-36% |

wherein the fatty acid profile represents (wt/wt) percent over total fatty acids.

[2002] 37. The composition of any one of embodiments 23-36, wherein the composition has a fatty acid profile comprising:

| | |
|---|---|
| oleic acid (18:1) | about 17%-27% |

wherein the fatty acid profile represents (wt/wt) percent over total fatty acids.

[2003] 37.1 The composition of any one of embodiments 23-36, wherein the composition has a fatty acid profile comprising:

| | |
|---|---|
| oleic acid (18:1) | about 7%-37% |

wherein the fatty acid profile represents (wt/wt) percent over total fatty acids.

[2004] 38. The composition of any one of embodiments 23-37, wherein the composition has a fatty acid profile comprising:

| | |
|---|---|
| linoleic acid (18:2) | about 0.5%-3.1% |

wherein the fatty acid profile represents (wt/wt) percent over total fatty acids.

[2005] 38.1 The composition of any one of embodiments 23-37, wherein the composition has a fatty acid profile comprising:

| | |
|---|---|
| linoleic acid (18:2) | about 0.01%-13.1% |

wherein the fatty acid profile represents (wt/wt) percent over total fatty acids.

[2006] 39. The composition of any one of embodiments 23-33, wherein the composition has a fatty acid profile comprising any one or more of:

| | |
|---|---|
| a) palmitic acid (16:0) | about 23%-32% |
| b) stearic acid (18:0) | about 21%-26% |
| c) oleic acid (18:1) | about 17%-27% |
| d) linoleic acid (18:2) | about 0.5%-3.1% |

wherein the fatty acid profile represents (wt/wt) percent over total fatty acids.

[2007] 40. The composition of any one of embodiments 23-33, wherein the composition has a fatty acid profile comprising:

| | |
|---|---|
| palmitic acid (16:0) | about 23%-32% |
| stearic acid (18:0) | about 21%-26% |
| oleic acid (18:1) | about 17%-27% |
| linoleic acid (18:2) | about 0.5%-3.1% |

wherein the fatty acid profile represents (wt/wt) percent over total fatty acids.

[2008] 40.1 The composition of any one of embodiments 23-33, wherein the composition has a fatty acid profile comprising:

| | |
|---|---|
| palmitic acid (16:0) | about 13%-42% |
| stearic acid (18:0) | about 11%-36% |
| oleic acid (18:1) | about 7%-37% |
| linoleic acid (18:2) | about 0.01%-13.1% |

wherein the fatty acid profile represents (wt/wt) percent over total fatty acids.

[2009] 41. The composition of any one of embodiments 23-33, wherein the composition has a fatty acid profile comprising:

| | |
|---|---|
| palmitic acid (16:0), | about 28% |
| stearic acid (18:0), | about 11% |
| oleic acid (18:1), | about 22% |
| linoleic acid (18:2) | about 2.5% |

wherein the fatty acid profile represents (wt/wt) percent over total fatty acids.

[2010] 42. The composition of any one of embodiments 23-33, wherein the composition has a fatty acid profile comprising any one or more of:

| | |
|---|---|
| a) C4:0 fatty acids | about 1%-7% |
| b) C6:0 fatty acids | about 0.5-6% |
| c) C8:0 fatty acids | about 0.5%-4.5% |
| d) C10:0 fatty acids | about 0.4%-6% |
| e) C12:0 fatty acids | about 0.4%-6.5% |
| f) C14:0 fatty acids | about 7%-13% |
| g) C16:0 fatty acids | about 26%-32% |
| h) C16:1 fatty acids | about 0.2%-4.2% |
| i) C18:0 fatty acids | about 14%-21% |
| j) C18:1 fatty acids | about 18%-26% |
| k) C18:2 fatty acids | about 0.5%-7% |

wherein the fatty acid profile represents (wt/wt) percent over total fatty acids.

[2011] 42.1 The composition of any one of embodiments 23-33, wherein the composition has a fatty acid profile comprising any one or more of:

| | |
|---|---|
| a) C4:0 fatty acids | about .01%-17% |
| b) C6:0 fatty acids | about 0.01-16% |
| c) C8:0 fatty acids | about 0.01%-14.5% |
| d) C10:0 fatty acids | about 0.01%-16% |
| e) C12:0 fatty acids | about 0.01%-16.5% |
| f) C14:0 fatty acids | about 0.1%-23% |
| g) C16:0 fatty acids | about 16%-42% |
| h) C16:1 fatty acids | about 0.01%-14.2% |
| i) C18:0 fatty acids | about 4%-31% |
| j) C18:1 fatty acids | about 8%-36% |
| k) C18:2 fatty acids | about 0.01%-17% |

wherein the fatty acid profile represents (wt/wt) percent over total fatty acids.

[2012] 43. The composition of any one of embodiments 23-33, wherein the composition has a fatty acid profile comprising:

| | |
|---|---|
| C4:0 fatty acids | about 1%-7% |
| C6:0 fatty acids | about 0.5-6% |
| C8:0 fatty acids | about 0.5%-4.5% |
| C10:0 fatty acids | about 0.4%-6% |
| C12:0 fatty acids | about 0.4%-6.5% |
| C14:0 fatty acids | about 7%-13% |
| C16:0 fatty acids | about 26%-32% |
| C16:1 fatty acids | about 0.2%-4.2% |
| C18:0 fatty acids | about 14%-21% |
| C18:1 fatty acids | about 18%-26% |
| C18:2 fatty acids | about 0.5%-7% |

wherein the fatty acid profile represents (wt/wt) percent over total fatty acids.

[2013] 43.1 The composition of any one of embodiments 23-33, wherein the composition has a fatty acid profile comprising:

| | |
|---|---|
| C4:0 fatty acids | about .01%-17% |
| C6:0 fatty acids | about 0.01-16% |
| C8:0 fatty acids | about 0.01%-14.5% |
| C10:0 fatty acids | about 0.01%-16% |
| C12:0 fatty acids | about 0.01%-16.5% |
| C14:0 fatty acids | about 0.1%-23% |
| C16:0 fatty acids | about 16%-42% |
| C16:1 fatty acids | about 0.01%-14.2% |
| C18:0 fatty acids | about 4%-31% |
| C18:1 fatty acids | about 8%-36% |
| C18:2 fatty acids | about 0.01%-17% |

wherein the fatty acid profile represents (wt/wt) percent over total fatty acids.

[2014] 44. The composition of any one of embodiments 23-33, wherein the composition has a fatty acid profile comprising:

| | |
|---|---|
| C4:0 fatty acids | about 4.34% |
| C6:0 fatty acids | about 2.70% |
| C8:0 fatty acids | about 1.60% |
| C10:0 fatty acids | about 3.40% |
| C12:0 fatty acids | about 3.48% |
| C14:0 fatty acids | about 10.00% |
| C16:0 fatty acids | about 29.20% |
| C16:1 fatty acids | about 1.29% |
| C18:0 fatty acids | about 17.47% |
| C18:1 fatty acids | about 22.84% |
| C18:2 fatty acids | about 3.67% |

[2015] wherein the fatty acid profile represents (wt/wt) percent over total fatty acids.

[2016] 45. The composition of any one of embodiments 23-44, wherein the composition comprises added short chain fatty acids.

[2017] 46. The composition of embodiment 45, wherein the added short chain fatty acids are added in the form of a plant oil.

[2018] 47. The composition of embodiment 46, wherein the plant oil is selected from the group consisting of soybean oil, palm oil, coconut oil, almond oil, avocado oil, cocoa butter oil, corn oil, cottonseed oil, flax seed oil, grapeseed oil, hemp oil, olive oil, palm kernel oil, peanut oil, pumpkin seed oil, rice bran oil, safflower seed oil, sesame seed oil, sunflower seed oil, walnut oil, and combinations thereof.

[2019] 96. A method of expressing a transgene in a plant cell, the method comprising: (i) providing a plant cell lacking at least one endogenous promoter; (ii) transforming the plant cell with a nucleic acid comprising a promoter and a transgene, wherein the promoter has the same sequence as the endogenous promoter; and (ii) maintaining the plant cell under conditions wherein the transgene is expressed.

[2020] 97. The method of embodiment 96, wherein the plant cell is a dicot cell from soybean, lima bean, Arabidopsis, tobacco, rice, maize, barley, sorghum, wheat or oat.

[2021] 98. The method of embodiment 96, wherein the plant cell is a monocot cell from turf grass, maize, rice, oat, wheat, barley, sorghum, orchid, iris, lily, onion, palm, or duckweed.

[2022] 99. The method of embodiment 96, wherein the promoter is the Glycinin 1 or Seed 2 promoter.

[2023] 100. The method of embodiment 96, wherein the transgene is a mammalian, avian, or plant gene.

[2024] 101. The method of embodiment 100, wherein the transgene encodes a milk protein selected from α-S1 casein, α-S2 casein, β-casein, κ-casein, para-κ-casein, β-lactoglobulin, α-lactalbumin, lysozyme, lactoferrin, lactoperoxidase, serum albumin, or an immunoglobulin.

[2025] 102. The method of embodiment 100, wherein transgene encodes an avian protein selected from ovalbumin, ovotransferrin, ovoglobulin, and lysozyme.

[2026] 103. The method of embodiment 100, wherein the transgene encodes a plant protein selected from oleosins, leghemoglobin, extension-like protein family, prolamin, glutenin, gamma-kafirin preprotein, α-globulin, basic 7S globulin precursor, 2S albumin, (3-conglycinins, glycinins, canein, zein, patatin, kunitz-trypsin inhibitor, bowman-birk inhibitor, and cystatine.

[2027] 104. A plant cell lacking at least one endogenous promoter; wherein the plant cell comprises a nucleic acid comprising a promoter and a transgene; wherein the promoter has the same sequence as the endogenous promoter.

### Embodiment Set Number 29: Compositions of Interest (Percent by Weight or Soluble Protein)

[2028] 1. A composition comprising:
[2029] a) a recombinant mammalian milk protein;
[2030] b) soy protein;
[2031] wherein the milk protein comprises at least 0.2%, 0.3%, 0.4%, 0.5%, 0.6%, 0.7%, 0.8%, 0.9%, 1%, 2%, 3%, 4%, 5%, 6%, 7%, 8%, 9%, 10%, 11%, 12%, 13%, 14%, 15%, 16%, 17%, 18%, 19%, 20%, 21%, 22%, 23%, 24%, 25%, 26%, 27%, 28%, 29%, 30%, 31%, 32%, 33%, 34%, or 35% by weight of the composition.

[2032] 1.1 A composition comprising:
[2033] a) a recombinant mammalian milk protein;
[2034] b) soy protein; wherein the milk protein comprises at least 0.2%, 0.3%, 0.4%, 0.5%, 0.6%, 0.7%, 0.80%, 0.9%, 10%, 2%, 3%, 4%, 5%, 6%, 7%, 8%, 9%, 10%, 110%, 12%, 130%, 14%, 15%, 16%, 17%, 18%, 19%, 20%, 21%, 22%, 23%, 24%, 25%, 26%, 27%, 28%, 29%, 30%, 31%, 32%, 33%, 34%, or 35% by dry weight of the composition.

[2035] 1.2 A composition comprising:
[2036] a) a recombinant mammalian milk protein;
[2037] b) soy protein;
[2038] wherein the milk protein comprises at least 4%, 5%, 6%, 7%, 8%, 9%, 10%, 11%, 12%, 13%, 14%, 15%, 16%, 17%, 18%, 19%, 20%, 21%, 22%, 23%, 24%, 25%, 26%, 27%, 28%, 29%, 30%, 31%, 32%, 33%, 34%, or 35% of the total protein content of the composition.

[2039] 2. The composition of any one of embodiment 1-1.3, comprising c) a fat or lipid.

[2040] 3. The composition of any one of embodiments 1-2, wherein the milk protein comprises at least 4%, 5%, 6%, 7%, 8%, 9%, 10%, 11%, 12%, 13%, 14%, 15%, 16%, 17%, 18%, 19%, 20%, 21%, 22%, 23%, 24%, 25%, 26%, 27%, 28%, 29%, 30%, 31%, 32%, 33%, 34%, or 35% of the total soluble protein content of the composition.

[2041] 4. The composition of any one of embodiments 1-3, wherein the recombinant mammalian milk protein lacks an animal secretion signal peptide.

[2042] 5. The composition of any one of embodiments 1-3, wherein the recombinant mammalian milk protein is a truncated milk protein, lacking an animal secretion signal peptide.

[2043] 6. The composition of any one of embodiments 1-5, wherein the recombinant mammalian milk protein was expressed from a dicotyledenous plant.

[2044] 7. The composition of any one of embodiments 1-5, wherein the recombinant mammalian milk protein was expressed in a soybean.

[2045] 8. The composition of any one of embodiments 1-5, wherein the recombinant mammalian milk protein and the soybean protein were expressed together in soybean.

[2046] 9. The composition of any one of embodiments 1-8, wherein the milk protein is selected from the group consisting of: α-S1 casein, α-S2 casein, β-casein, κ-casein, para-κ-casein, and β-lactoglobulin.

[2047] 10. The composition of any one of embodiments 1-8, wherein the milk protein is selected from the group consisting of: α-S1 casein, α-S2 casein, β-casein, κ-casein, para-κ-casein, β-lactoglobulin, α-lactalbumin, lysozyme, lactoferrin, lactoperoxidase, serum albumin, and an immunoglobulin

[2048] 11. The composition of any one of embodiments 1-10, wherein the composition does not have lactose.

[2049] 12. The composition of any one of embodiments 1-11, wherein said composition does not have one or more proteins present in cow milk.

[2050] 13. The composition of any one of embodiments 1-11, wherein said composition does not have the full complement of casein proteins present in cow milk.

[2051] 14. The composition of embodiment 12, wherein the one or more proteins present in cow milk are selected from the group consisting of α-S1 casein, α-S2 casein, β-casein, κ-casein, para-κ-casein, β-lactoglobulin, α-lactalbumin, lysozyme, lactoferrin, lactoperoxidase, serum albumin, and an immunoglobulin.

[2052] 15. The composition of embodiment 13, wherein the full complement of caseins present in cow milk consists essentially of α-S1 casein, α-S2 casein, β-casein, and κ-casein.

[2053] 16. The composition of embodiment 12, wherein the one or more proteins present in cow milk are selected from the group consisting of α-lactalbumin, lysozyme, lactoferrin, lactoperoxidase, serum albumin, and an immunoglobulin.

[2054] 17. The composition of any one of embodiments 1-16, further comprising: c) chlorophyll.

[2055] 18. The composition of any one of embodiments 1-17, wherein the recombinant milk protein is expressed in a fusion protein with a fusion partner

[2056] 19. The composition of embodiment 18, wherein the fusion partner is a milk protein.

[2057] 20. The composition of embodiment 19, wherein the fusion partner is selected from the group consisting of: α-S1 casein, α-S2 casein, β-casein, κ-casein, para-κ-casein, and 0-lactoglobulin.

[2058] 21. The composition of embodiment 19, wherein the fusion partner is selected from the group consisting of: α-S1 casein, α-S2 casein, β-casein, κ-casein, para-κ-casein, 0-lactoglobulin, α-lactalbumin, lysozyme, lactoferrin, lactoperoxidase, serum albumin, and an immunoglobulin

[2059] 22. The composition of embodiment 18, wherein the fusion protein is selected from the group consisting of
[2060] a) Beta-casein-AlphaS1-casein-AlphaS1-casein-Beta-casein;
[2061] b) Beta-casein-Beta-casein-Kappa-casein-Beta-lactoglobulin;
[2062] c) Beta-casein-Beta-casein-Beta-casein-Beta-casein; and
[2063] d) Gamma-Zein-Beta-casein.

[2064] 23. The composition of any one of embodiments 1-22, wherein the composition is a coffee creamer, a cheese, or a substitute milk product.

[2065] 23. The composition of any one of embodiments 1-22, wherein the composition is capable of producing a food product with more dairy-like properties than a control food product lacking the recombinant milk protein.

[2066] 24. The composition of any one of embodiments 1-23, wherein the composition is capable of producing a food product with greater stretch and melt properties than a control food product lacking the recombinant milk protein.

[2067] 25. The composition of any one of embodiments 1-24, further comprising: a nucleic acid encoding glycinin.

[2068] 26. The composition of any one of embodiments 1-25, further comprising: a nucleic acid encoding lipoxygenase.

[2069] 27. The composition of any one of embodiments 1-26, further comprising: a nucleic acid encoding kunitz trypsin inhibitor.

[2070] 28 The composition of any one of embodiments 1-27, wherein the recombinant mammalian milk protein comprises reduced phosphorylation as compared to a corresponding mammalian milk protein in a bovine as determined by mass spectrometry.

### Embodiment Set Number 30 (Universal Vector)

[2071] 1. A vector for expressing a gene of interest, said vector comprising in order from 5′ to 3′: a) a seed-specific promoter; b) a signal peptide; and c) a double terminator.

[2072] 2. The vector of embodiment 1, wherein the seed-specific promoter is selected from the group consisting of PvPhas, BnNap, AtOle1, GmSeed2, GmSeed3, GmSeed5, GmSeed6, GmSeed7, GmSeed8, GmSeed10, GmSeed11, GmSeed12, pBCON, GmCEP1-L, GmTHIC, GmBg7S1, GmGRD, GmOLEA, GmOLER, Gm2S-1, and GmBBld-II.

[2073] 3. The vector of embodiment 1, wherein the seed-specific promoter is GmSeed2.

[2074] 4. The vector of embodiment 1, wherein the seed-specific promoter is GmSeed2 and comprises the sequence of SEQ ID NO: 19, or a sequence at least 90% identical thereto.

[2075] 4.1 The vector of any one of embodiments 1-4, wherein the signal peptide is a plant signal peptide.

[2076] 4.2 The vector of embodiment 4.1, wherein the signal peptide directs translationally fused proteins to the secretory pathway.

[2077] 5. The vector of any one of embodiments 1-4.2, wherein the signal peptide is selected from the group consisting of GmSCB1, StPat21, 2Sss, Sig2, Sig12, Sig8, Sig10, Sig11, and Coixss.

[2078] 6. The vector of any one of embodiments 1-5, wherein the signal peptide is Sig2.

[2079] 7. The vector of any one of embodiments 1-6, wherein the signal peptide is Sig2 and comprises the sequence of SEQ ID NO: 814, or a sequence at least 90% identical thereto.

[2080] 8. The vector of any one of embodiments 1-7, wherein the vector comprises a terminator isolated or derived from a gene encoding Nopaline synthase, Arc5-1, an Extensin, Rb7 matrix attachment region, a Heat shock protein, Ubiquitin 10, Ubiquitin 3, and M6 matrix attachment region.

[2081] 9. The vector of any one of embodiments 1-8, wherein the vector comprises an Rb7 matrix attachment region.

[2082] 10. The vector of any one of embodiments 1-9, wherein the vector comprises an M6 matrix attachment region.

[2083] 11. The vector of any one of embodiments 1-10, wherein the dual terminator is AtHSP:AtUbi10.

[2084] 12. The vector of any one of embodiments 1-11, wherein the dual terminator is AtHSP:AtUbi10 and comprises the sequence of SEQ ID NO: 141, or a sequence at least 90% at least 95%, at least 96%, at least 97%, at least 98%, or at least 99% identical thereto.

[2085] 13. The vector of any one of embodiments 1-12, wherein the dual terminator is EU:TM6.

[2086] 14. The vector of any one of embodiments 1-13, wherein the dual terminator is EU:TM6 and comprises the sequence of SEQ ID NO: 146, or a sequence at least 90% at least 95%, at least 96%, at least 97%, at least 98%, or at least 99% identical thereto.

[2087] 15. The vector of any one of embodiments 1-14, wherein the vector encodes for an endoplasmic retention signal.

[2088] 16. The vector of embodiment 15, wherein the endoplasmic retention signal is a KDEL sequence.

[2089] 17. The vector of embodiment 16, wherein the KDEL sequence comprises SEQ ID NO: 23.

[2090] 18. The vector of any one of embodiments 1-17, wherein the gene of interest encodes for a mammalian milk protein.

[2091] 19. The vector of any one of embodiments 1-17, wherein the gene of interest encodes a fusion protein comprising a first and a second mammalian milk protein.

[2092] 20. The vector of any one of embodiments 18-19, wherein the mammalian milk protein is selected from the group consisting of α-S1 casein, α-S2 casein, β-casein, κ-casein, para-κ-casein, β-lactoglobulin, α-lactalbumin, lysozyme, lactoferrin, lactoperoxidase, serum albumin, and an immunoglobulin.

[2093] 22. A vector for expressing a gene of interest, said vector comprising in order from 5′ to 3′: a) a GmSeed2 seed-specific promoter that comprises the sequence of SEQ ID NO: 19, or a sequence at least 90% identical thereto; b) a sequence encoding for a Sig2 signal peptide that comprises the sequence of SEQ ID NO: 814, or a sequence at least 90% identical thereto; and c) a AtHSP:AtUbi10 double terminator that comprises the sequence of SEQ ID NO: 141, or a sequence at least 90% at least 95%, at least 96%, at least 97%, at least 98%, or at least 99% identical thereto.

[2094] 23. The vector of embodiment 22, wherein the endoplasmic retention signal is a KDEL sequence.

[2095] 24. The vector of embodiment 23, wherein the KDEL sequence comprises SEQ ID NO: 23.

[2096] 25. The vector of any one of embodiments 22-24, wherein the vector comprises an Rb7 matrix attachment region.

[2097] 26. The vector of claim 22, wherein the vector comprises an M6 matrix attachment region.

[2098] 27. A method of expressing a transgene in a plant cell, the method comprising: (i) providing a plant cell lacking at least one endogenous promoter; (ii) transforming the plant cell with a nucleic acid comprising a promoter and a transgene, wherein the promoter has the same sequence as the endogenous promoter; and (ii) maintaining the plant cell under conditions wherein the transgene is expressed.

[2099] 97. The method of embodiment 96, wherein the plant cell is a dicot cell from soybean, lima bean, Arabidopsis, tobacco, rice, maize, barley, sorghum, wheat or oat.

[2100] 98. The method of embodiment 96, wherein the plant cell is a monocot cell from turf grass, maize, rice, oat, wheat, barley, sorghum, orchid, iris, lily, onion, palm, or duckweed.

[2101] 99. The method of embodiment 96, wherein the promoter is the Glycinin 1 or Seed 2 promoter.

[2102] 100. The method of embodiment 96, wherein the transgene is a mammalian, avian, or plant gene.

[2103] 101. The method of embodiment 100, wherein the transgene encodes a milk protein selected from α-S1 casein, α-S2 casein, β-casein, κ-casein, para-κ-casein, β-lactoglobulin, α-lactalbumin, lysozyme, lactoferrin, lactoperoxidase, serum albumin, or an immunoglobulin.

[2104] 28. The method of embodiment 27, wherein transgene encodes an avian protein selected from ovalbumin, ovotransferrin, ovoglobulin, and lysozyme.

[2105] 29. The method of embodiment 27, wherein the transgene encodes a plant protein selected from oleosins, leghemoglobin, extension-like protein family, prolamin, glutenin, gamma-kafirin preprotein, α-globulin, basic 7S globulin precursor, 2S albumin, 0-conglycinins, glycinins, canein, zein, patatin, kunitz-trypsin inhibitor, bowman-birk inhibitor, and cystatine.

[2106] 30. A plant cell lacking at least one endogenous promoter; wherein the plant cell comprises a nucleic acid comprising a promoter and a transgene; wherein the promoter has the same sequence as the endogenous promoter.

### Embodiment Set 32 (Amino Acid Rebalancing)

[2107] 1. A transgenic plant, plant part, plant cell, or plant tissue culture comprising a recombinant construct, said construct comprising (i) a tissue-specific promoter, (ii) a first nucleic acid sequence encoding a bovine milk protein, which is operably linked to said promoter, and (iii) a termination sequence; wherein tissue-specific promoter is selected from the group consisting of an nucleic acid having at least 95% sequence identity to SEQ ID NOs: 19-30; wherein said milk protein is selected from the group consisting of α-S1 casein, α-S2 casein, β-casein, κ-casein, α-lactalbumin, β-lactoglobulin, and lysozyme; and wherein said plant, plant part, plant cell, or plant tissue culture expresses said milk protein, and has enhanced milk protein production compared to untransformed control plants.

[2108] 2. The transgenic plant, plant part, plant cell, or plant tissue culture of embodiment 1, wherein said construct further comprises an ER retention signal sequence.

[2109] 3. The transgenic plant, plant part, plant cell, or plant tissue culture of embodiment 1, wherein said construct further comprises (i) at least one second nucleic acid sequence encoding a guide RNA and (ii) a third nucleic acid sequence encoding a Clustered regularly interspaced short palindromic repeats (CRISPR) endonuclease, wherein said guide RNA is capable of forming a complex with said CRISPR endonuclease, and wherein said complex is capable of binding to and creating a double strand break in a genomic target sequence of said plant genome.

[2110] 4. The transgenic plant, plant part, plant cell, or plant tissue culture of embodiment 3, wherein the target sequence is a nucleic acid sequence encoding a seed storage protein.

[2111] 5. The transgenic plant, plant part, plant cell, or plant tissue culture of embodiment 1, wherein the plant is selected from the group consisting of soybean, lima bean, common bean, green pea, chickpea, Pisum sativum, rapeseed, Arabidopsis thaliana, tobacco, duckweed, hybrid aspen, muskmelon, potato, tomato, canola, crambe, mustard, castor bean, sesame, linseed, maize, barley, peanut, alfalfa, wheat, rice, oat, sorghum, rye, tritordeum, millet, fescue, perennial ryegrass, sugarcane, cranberry, papaya, banana, safflower, oil palms, flax, muskmelon, apple, cucumber, dendrobium, gladiolus, chrysanthemum, liliacea, cotton, eucalyptus, sunflower, turfgrass, sugarbeet, coffee, and dioscorea.

[2112] 6. The transgenic plant, plant part, plant cell, or plant tissue culture of embodiment 1, wherein the plant is soybean, lima bean, common bean, green pea, chickpea, Pisum sativum, or rapeseed.

[2113] 7. The transgenic plant, plant part, plant cell, or plant tissue culture of embodiment 1, wherein the first nucleic acid is expressed in an tissue specific manner.

[2114] 8. The transformed plant, plant part, plant cell, or plant tissue culture of embodiment 7, wherein the nucleic acid is expressed in a seed.

[2115] 9. The transgenic plant, plant part, plant cell, or plant tissue culture of embodiment 1, wherein the first nucleic acid sequence encoding κ-casein is codon-optimized.

[2116] 10. The transgenic plant, plant part, plant cell, or plant tissue culture of embodiment 1, wherein the first nucleic acid sequence encoding β-casein is codon-optimized.

[2117] 11. The transgenic plant, plant part, plant cell, or plant tissue culture of embodiment 1, wherein the first nucleic acid sequence encoding α-S1 casein is codon-optimized.

[2118] 12. The transgenic plant, plant part, plant cell, or plant tissue culture of embodiment 1, wherein the first nucleic acid sequence encoding α-S2 casein is codon-optimized.

[2119] 13. The transgenic plant, plant part, plant cell, or plant tissue culture of embodiment 1, wherein the first nucleic acid sequence encoding α-lactalbumin is codon-optimized.

[2120] 14. The transgenic plant, plant part, plant cell, or plant tissue culture of embodiment 1, wherein the first nucleic acid sequence encoding β-lactoglobulin is codon-optimized.

[2121] 15. The transgenic plant, plant part, plant cell, or plant tissue culture of embodiment 1, wherein the first nucleic acid sequence encoding lysozyme is codon-optimized.

[2122] 16. The transgenic plant, plant part, plant cell, or plant tissue culture of embodiment 1, wherein the first nucleic acid sequence encodes κ-casein having at least 95% sequence identity to SEQ ID No:10 or SEQ ID No:11.

[2123] 17. The transgenic plant, plant part, plant cell, or plant tissue culture of embodiment 1, wherein the first nucleic acid sequence encoding β-casein having at least 95% sequence identity to SEQ ID No:12 or SEQ ID No:13.

[2124] 18. The transgenic plant, plant part, plant cell, or plant tissue culture of embodiment 1, wherein the first nucleic acid sequence encoding α-S1 having at least 95% sequence identity to SEQ ID No:14.

[2125] 19. The transgenic plant, plant part, plant cell, or plant tissue culture of embodiment 1, wherein the first nucleic acid sequence encoding α-S2 casein having at least 95% sequence identity to SEQ ID No:15.

[2126] 20. The transgenic plant, plant part, plant cell, or plant tissue culture of embodiment 1, wherein the first nucleic acid sequence encoding α-lactalbumin having at least 95% sequence identity to SEQ ID No:16.

[2127] 21. The transgenic plant, plant part, plant cell, or plant tissue culture of embodiment 1, wherein the first nucleic acid sequence encoding β-lactoglobulin having at least 95% sequence identity to SEQ ID No: 17.

[2128] 22. The transgenic plant, plant part, plant cell, or plant tissue culture of embodiment 1, wherein the first nucleic acid sequence encoding lysozyme having at least 95% sequence identity to SEQ ID No:18.

[2129] 23. The transgenic plant, plant part, plant cell, or plant tissue culture of embodiment 1, wherein the termination sequence is a nopaline synthase (NOS) terminator.

[2130] 24. The transgenic plant, plant part, plant cell, or plant tissue culture of embodiment 3, wherein the transgenic plant produces a seed with a rebalanced storage protein level when a gene encoding the storage protein is mutated by a gene-editing technique.

[2131] 25. The transgenic plant, plant part, plant cell, or plant tissue culture of embodiment 3, wherein the bovine milk protein level increases in the seed with the rebalanced storage protein level, when compared to a seed produced from a non-rebalanced transgenic plant; wherein the non-rebalanced transgenic plant has the recombinant DNA construct without mutation in the gene encoding the storage protein.

[2132] 26. A method of producing said transgenic plant of embodiment 1, said method comprising the steps of: (a) introducing at least one expression cassette capable of expressing a milk protein into a plant, a part thereof, or a cell thereof; (b) obtaining the transgenic plant, the part thereof, or the cell thereof, which stably expresses the milk protein; (c) cultivating the transgenic plant, the part thereof, or the cell thereof; and (d) harvesting the transgenic plant, the part thereof, or the cell thereof.

[2133] 27. A seed produced by the method of embodiment 26.

[2134] 28. A method of producing a hybrid transgenic plant seed, wherein the method comprises crossing the plant of embodiment 1 with a different plant and harvesting the resultant hybrid plant seed.

[2135] 29. A hybrid transgenic plant seed produced by method of embodiment 28.

[2136] 30. A method of producing a bovine milk protein from a seed of said transgenic plant of embodiment 1, said method comprising the steps of: (a) extracting the bovine milk protein from the seed; and (b) purifying the bovine milk protein from the seed, wherein the bovine milk protein comprises α-S1 casein, α-S2 casein, β-casein, κ-casein, α-lactalbumin, β-lactoglobulin, and lysozyme; and wherein the bovine milk protein further comprises a proteolytic product of α-S1 casein, α-S2 casein, β-casein, κ-casein, α-lactalbumin, 0-lactoglobulin, and lysozyme.

[2137] 31. A method of breeding transgenic plants to produce plants with enhanced milk protein production comprising: (a) making a cross between a first transgenic plant of embodiment 1 with a second plant to produce a F1 plant; (b) backcrossing the F1 plant to the second plant; and (c) repeating the backcrossing step one or more times to generate a near isogenic or isogenic line, wherein the expression cassette of embodiment 26 is integrated into the genome of the second plant and the near isogenic or isogenic line derived from the second plant with the nucleic acid sequences encoding the milk protein has enhanced milk protein production compared to untransformed control plants.

[2138] 32. A food comprising a transgenic plant containing the nucleic acid of embodiment 1 or 3.

[2139] 33. A food prepared from a transgenic plant containing the nucleic acid of embodiment 1 or 3.

[2140] 34. A product prepared from a transgenic plant containing the nucleic acid of embodiment 1 or 3.

### Embodiment Set 33

[2141] 1. A method for increasing yield of recombinant milk protein production per acre in soybean, comprising: providing to a locus a plurality of transgenic soybean seed, wherein the transgenic soybean seed comprise a recombinant DNA construct encoding a fusion protein comprising at least one milk protein, and wherein the plurality of transgenic soybean seed produce in the aggregate at least 2 pounds of recombinant milk protein per acre.

[2142] 2. The method of embodiment 1, wherein the plurality of transgenic soybean seed produce in the aggregate at least 5, 10, 20, 30, 40, 50, 60, 70, 80, 90, 100, 150, 200, 250, 300, 350, or 400 pounds of recombinant milk protein per acre

[2143] 3. A method for increasing yield of recombinant milk protein production per bushel in soybean, comprising: providing to a locus a plurality of transgenic soybean seed, wherein the transgenic soybean seed comprise a recombinant DNA construct encoding a fusion protein comprising at least one milk protein, and wherein the plurality of transgenic soybean seed produce in the aggregate at least 0.2 pounds of recombinant milk protein per bushel.

[2144] 4. The method of embodiment 3, wherein the plurality of transgenic soybean seed produce in the aggregate at least 0.5, 1.0, 1.5, 2.0, 2.5, 3.0, 3.5, or 4.0 pounds of recombinant milk protein per bushel.

[2145] 5. A method for increasing the amount of recombinant milk protein produced per soybean seed, comprising: providing to a locus a transgenic soybean seed, wherein the transgenic soybean seed comprises a recombinant DNA construct encoding a fusion protein comprising at least one milk protein, and wherein the transgenic soybean seed produces at least 0.35 mg of recombinant milk protein per soybean seed.

[2146] 6. The method of embodiment 5, wherein the transgenic soybean seed produces at least 0.5, 1.0, 2.0, 3.0, 4.0, 5.0, 6.0, 7.0, or 8.0 mg of recombinant milk protein per soybean seed.

[2147] 7. A method for increasing yield of recombinant milk protein production per acre in soybean, comprising: providing to a locus a plurality of transgenic soybean seed at a density of at least about 50,000 seeds per acre; and growing the plurality of transgenic soybean seed until plant maturity and fruit pod formation, wherein each transgenic soybean seed in the mature fruit pod produces at least 0.35 mg of recombinant milk protein per soybean seed.

[2148] 8. A method for increasing yield of recombinant milk protein production per acre in soybean, comprising: providing to a locus a plurality of genetically modified soybean seed, wherein the plurality of genetically modified soybean seed produce in the aggregate at least 2 pounds of recombinant milk protein per acre.

[2149] 9. The method of embodiment 8, wherein the plurality of genetically modified soybean seed produce in the aggregate at least 5, 10, 20, 30, 40, 50, 60, 70, 80, 90, 100, 150, 200, 250, 300, 350, or 400 pounds of recombinant milk protein per acre

[2150] 10. A method for increasing yield of recombinant milk protein production per bushel in soybean, comprising: providing to a locus a plurality of genetically modified soybean seed, wherein the plurality of genetically modified soybean seed produce in the aggregate at least 0.2 pounds of recombinant milk protein per bushel.

[2151] 11. The method of embodiment 10, wherein the plurality of genetically modified soybean seed produce in the aggregate at least 0.5, 1.0, 1.5, 2.0, 2.5, 3.0, 3.5, or 4.0 pounds of recombinant milk protein per bushel.

[2152] 12. A method for increasing the amount of recombinant milk protein produced per soybean seed, comprising: providing to a locus a genetically modified soybean seed, wherein the genetically modified soybean seed produces at least 0.35 mg of recombinant milk protein per soybean seed.

[2153] 13. The method of embodiment 12, wherein the genetically modified soybean seed produces at least 0.5, 1.0, 2.0, 3.0, 4.0, 5.0, 6.0, 7.0, or 8.0 mg of recombinant milk protein per soybean seed.

[2154] 14. A method for increasing yield of recombinant milk protein production per acre in soybean, comprising: providing to a locus a plurality of genetically modified soybean seed at a density of at least about 50,000 seeds per acre; and growing the plurality of genetically modified soybean seed until plant maturity and fruit pod formation, wherein each genetically modified soybean seed in the mature fruit pod produces at least 0.35 mg of recombinant milk protein per soybean seed.

[2155] 15. The method of any one of embodiments 8 to 14, wherein the genetically modified soybean seed comprises at least one of the following genetic modifications: a recombinant DNA construct encoding a fusion protein comprising at least one milk protein; a recombinant DNA construct encoding a protein capable of forming a protein body; a recombinant DNA construct encoding a prolamin; a first recombinant DNA construct encoding a milk protein and a second recombinant DNA construct encoding a prolamin; a recombinant DNA construct encoding a milk protein that has been modified to have an amino acid sequence different from the native animal expressed milk protein; a recombinant DNA construct encoding a milk protein that has been modified to promote addition of a post-translational modification; a recombinant DNA construct encoding a milk protein that has been modified to prevent addition of a post-translational modification; a recombinant DNA construct encoding an enzyme that alters post-translational modification of protein; a recombinant DNA construct encoding an enzyme capable of modifying a protein; a recombinant DNA construct encoding a kinase; or a genetic modification that modulates the expression of a plant protease.

[2156] 16. A method for increasing yield of recombinant milk protein production per acre in a plant, comprising: providing to a locus a plurality of transgenic plant seed, wherein the transgenic plant seed comprise a recombinant DNA construct encoding a fusion protein comprising at least one milk protein, and wherein the plurality of transgenic plant seed produce in the aggregate at least 2 pounds of recombinant milk protein per acre.

[2157] 17. The method of embodiment 16, wherein the plurality of transgenic plant seed produce in the aggregate at least 5, 10, 20, 30, 40, 50, 60, 70, 80, 90, 100, 150, 200, 250, 300, 350, or 400 pounds of recombinant milk protein per acre

[2158] 18. A method for increasing yield of recombinant milk protein production per acre in a plant, comprising: providing to a locus a plurality of genetically modified plant seed, wherein the plurality of genetically modified plant seed produce in the aggregate at least 2 pounds of recombinant milk protein per acre.

[2159] 19. The method of embodiment 18, wherein the plurality of genetically modified plant seed produce in the aggregate at least 5, 10, 20, 30, 40, 50, 60, 70, 80, 90, 100, 150, 200, 250, 300, 350, or 400 pounds of recombinant milk protein per acre

[2160] 20. The method of any one of embodiments 16 to 19, wherein the plant seed comprises at least one of the following genetic modifications: a recombinant DNA construct encoding a fusion protein comprising at least one milk protein; a recombinant DNA construct encoding a protein capable of forming a protein body; a recombinant DNA construct encoding a prolamin; a first recombinant DNA construct encoding a milk protein and a second recombinant DNA construct encoding a prolamin; a recombinant DNA construct encoding a milk protein that has been modified to have an amino acid sequence different from the native animal expressed milk protein; a recombinant DNA construct encoding a milk protein that has been modified to promote addition of a post-translational modification; a recombinant DNA construct encoding a milk protein that has been modified to prevent addition of a post-translational modification; a recombinant DNA construct encoding an enzyme that alters post-translational modification of protein; a recombinant DNA construct encoding an enzyme capable of modifying a protein; a recombinant DNA construct encoding a kinase; or a genetic modification that modulates the expression of a plant protease.

[2161] 21. The method of any one of embodiments 16 to 19, wherein the plant is a soybean.

[2162] While preferred embodiments of the present disclosure have been shown and described herein, it will be obvious to those skilled in the art that such embodiments are provided by way of example only. Numerous variations, changes, and substitutions will now occur to those skilled in the art without departing from the disclosure. It should be understood that various alternatives to the embodiments of the disclosure described herein may be employed in practicing the disclosure. It is intended that the following claims define the scope of the disclosure and that methods and structures within the scope of these claims and their equivalents be covered thereby.

### INCORPORATION BY REFERENCE

[2163] All references, articles, publications, patents, patent publications, and patent applications cited herein are incorporated by reference in their entireties for all purposes. However, mention of any reference, article, publication, patent, patent publication, and patent application cited herein is not, and should not be taken as, an acknowledgment or any form of suggestion that they constitute valid prior art or form part of the common general knowledge in any country in the world. Further, PCT International Publication No. WO 2018/187754 A1; U.S. Pat. Pub. No. US 2021/0222186 A1; U.S. Pat. Pub. No. US 2021/0010017 A1; U.S. Pat. Nos. 10,894,812; 11,304,743; 10,988,521; 10,947,552; and 11,072,797 are hereby incorporated by reference.

What is claimed is:

1. A food composition comprising:
a) a recombinant mammalian milk protein; and
b) a modified soy protein component comprising:
i) β-conglycinin (7S globulin); and
ii) 11S globulin (11s globulin);
wherein the modified soy protein component comprises a lower amount of 7S globulin than the amount present in a wild type soybean seed.

2. The food composition of claim 1, wherein the modified soy protein component comprises less than about 85% of the amount of 7S globulin than the amount present in soy protein from wild type soybean seed.

3. The food composition of claim 1, wherein the modified soy protein component comprises less than about 75% of the amount of 7S globulin than the amount present in soy protein from wild type soybean seed.

4. The food composition of claim 1, wherein the modified soy protein component comprises less than about 50% of the amount of 7S globulin than the amount present in soy protein from wild type soybean seed.

5. The food composition of claim 1, wherein the (w/w) ratio of recombinant mammalian milk protein to 11S globulin is at least 1:2.

6. The food composition of claim 1, wherein the (w/w) ratio of recombinant mammalian milk protein to 11S globulin is at least 1:1.

7. The food composition of claim 1, wherein the recombinant mammalian milk protein lacks an animal secretion signal peptide.

8. The food composition of claim 1, wherein the recombinant mammalian milk protein is selected from the group consisting of: α-S1 casein, α-S2 casein, β-casein, κ-casein, para-κ-casein, and β-lactoglobulin.

9. The food composition of claim 1, wherein the recombinant mammalian milk protein comprises a casein.

10. The food composition of claim 1, wherein the recombinant mammalian milk protein is selected from the group consisting of: α-S1 casein, α-S2 casein, β-casein, and κ-casein.

11. The food composition of claim 1, wherein the composition does not have lactose.

12. The food composition of claim 1, comprising:
c) chlorophyll.

13. The food composition of claim 1, wherein the recombinant mammalian milk protein is expressed in a fusion protein with a fusion partner.

14. The food composition of claim 13, wherein the fusion partner is a milk protein.

15. The food composition of claim 13, wherein the fusion partner is selected from the group consisting of: α-S1 casein, α-S2 casein, β-casein, κ-casein, para-κ-casein, zein, and 0-lactoglobulin.

16. The food composition of claim 13, wherein the fusion protein is selected from the group consisting of:
i) β-casein-α-S1-casein-α-S1-casein-β-casein;
ii) β-casein-β-casein-κ-casein-β-lactoglobulin;
iii) β-casein-β-casein-β-casein-β-casein; and
iv) Gamma-Zein-β-casein.

17. The food composition of claim 1, wherein the composition is a coffee creamer, a cheese, a substitute milk product.

18. The food composition of claim 1, further comprising: a nucleic acid encoding a glycinin.

19. The food composition of claim 1, wherein the recombinant mammalian milk protein exhibits reduced phosphorylation as compared to a corresponding mammalian milk protein in a bovine as determined by mass spectrometry.

20. A method for producing a plant-based dairy substitute, the method comprising the steps of:
a) providing soy protein comprising: and
i) a recombinant mammalian milk protein; and
ii) a soy protein component comprising:
1) β-conglycinin (7S globulin); and
2) 11S globulin (11s);
b) reducing 7S globulin content within the soy protein component.

The application's sequence listing, which the Patent Office published only in electronic form, follows.

SEQUENCE LISTING (1118 sequences)

SEQ ID NO: 1 - DNA, 318 bp, synthetic construct
  misc_feature 1..318: note = Optimized para-kappa-casein truncated version 1 (paraOKC1-T)
  source 1..318: mol_type = other DNA
caagagcagaatcaagagcagccaatccgttgtgagaaggacgagaggttcttctcagacaagatcgccaaatatatacccatacaatatgtactctcacgctaccctagctacgggcttaactactatcagcaaaaacctgtagcactgataaataaccagtttctcccctatccctattatgctaaacctgccgccgtgaggagtccagcacaaatacttcagtggcaagtgctcagtaacaccgtgccagcaaaaagctgccaggctcagcccaccacaatggcccgtcatccccatcctcaccttagcttcatg

SEQ ID NO: 2 - protein, 106 aa, synthetic construct
  REGION 1..106: note = Optimized para-kappa-casein truncated version 1 (paraOKC1-T)
QEQNQEQPIRCEKDERFFSDKIAKYIPIQYVLSRYPSYGLNYYQQKPVALINNQFLPYPYYAKPAAVRSPAQILQWQVLSNTVPAKSCQAQPTTMARHPHPHLSFM

SEQ ID NO: 3 - DNA, 507 bp, synthetic construct
  misc_feature 1..507: note = Optimized kappa-casein truncated version 1 (OKC1-T)
  source 1..507: mol_type = other DNA
caagagcagaatcaagagcagccaatccgttgtgagaaggacgagaggttcttctcagacaagatcgccaaatatatacccatacaatatgtactctcacgctaccctagctacgggcttaactactatcagcaaaaacctgtagcactgataaataaccagtttctcccctatccctattatgctaaacctgccgccgtgaggagtccagcacaaatacttcagtggcaagtgctcagtaacaccgtgccagcaaaaagctgccaggctcagcccaccacaatggcccgtcatccccatcctcaccttagcttcatggcaatcccaccaaagaagaatcaagacaagaccgaaatacctaccatcaacacaattgcatctggagagcctaccagtacaccaacaactgaggcagtagagtctactgttgctacccttgaggacagccccgaggttatagagtccccacctgagataaataccgtgcaggtgacaagtaccgccgta

SEQ ID NO: 4 - protein, 169 aa, synthetic construct
  REGION 1..169: note = Optimized kappa-casein truncated version 1 (OKC1-T)
QEQNQEQPIRCEKDERFFSDKIAKYIPIQYVLSRYPSYGLNYYQQKPVALINNQFLPYPYYAKPAAVRSPAQILQWQVLSNTVPAKSCQAQPTTMARHPHPHLSFMAIPPKKNQDKTEIPTINTIASGEPTSTPTTEAVESTVATLEDSPEVIESPPEINTVQVTSTAV

SEQ ID NO: 5 - DNA, 627 bp, synthetic construct
  misc_feature 1..627: note = Optimized beta-casein truncated version 2 (OBC-T2)
  source 1..627: mol_type = other DNA
cgcgaactggaagagttgaacgtaccaggagagattgtagaatcactgagctcctcagaggagtctattactcgtatcaacaagaagatagagaagttccaatccgaggagcaacaacaaacagaggacgaattgcaggacaagatacatcctttcgcacagacccagagcctcgtctatccctttccaggtccaatccctaactctctcccccagaatatcccacccttgactcagactcccgtggtcgtaccccctttcttgcaacccgaggtgatgggggtttctaaagtcaaagaggctatggctcctaaacataaggaaatgccttttcccaaatatccagtggagccattcactgagagccagtctctgacacttacagatgtggaaaacttgcacctgcccttgccacttttgcagtcctggatgcaccaaccacatcaacccttgccccccacagtgatgtttcctccacaatcagttcttagtctctcccaaagcaaagtccttccagtgcctcagaaggccgtcccatacccccagagagatatgccaatacaggcattcttgctttaccaggaaccagtgctcggtcctgtacgtggcccattccctatcatagtg

SEQ ID NO: 6 - protein, 209 aa, synthetic construct
  REGION 1..209: note = Optimized beta-casein truncated version 2 (OBC-T2)
RELEELNVPGEIVESLSSSEESITRINKKIEKFQSEEQQQTEDELQDKIHPFAQTQSLVYPFPGPIPNSLPQNIPPLTQTPVVVPPFLQPEVMGVSKVKEAMAPKHKEMPFPKYPVEPFTESQSLTLTDVENLHLPLPLLQSWMHQPHQPLPPTVMFPPQSVLSLSQSKVLPVPQKAVPYPQRDMPIQAFLLYQEPVLGPVRGPFPIIV

SEQ ID NO: 7 - DNA, 597 bp, synthetic construct
  misc_feature 1..597: note = Optimized alpha S1-casein truncated version 1(OaS1-T)
  source 1..597: mol_type = other DNA
cgcccaaaacatcccataaaacatcaaggattgccccaggaagtactcaacgagaatctcctccgttttttcgttgctcctttccccgaagtgttcgggaaggaaaaagtaaacgagctttcaaaggacatcggctctgaaagtaccgaggatcaggctatggaagatatcaagcaaatggaggccgaatctataagttcttcagaagaaatagttcccaactcagtggagcagaagcacattcagaaagaagacgtgcccagcgagcgctatctgggatatttggaacagctgctcagactgaaaaagtacaaggtgcctcagctcgaaatcgtacccaatagtgctgaagaaaggttgcactcaatgaaagaggggattcacgcacaacaaaaagagcctatgatcggagtaaatcaagaactggcatacttttatcccgagttgtttcgccaattctatcaactggatgcctacccttccggtgcatggtactacgtacccctcggtactcaatataccgatgctccctccttttccgacattcctaatcctataggttccgagaatagcgaaaagaccaccatgcccttatgg

SEQ ID NO: 8 - protein, 199 aa, synthetic construct
  REGION 1..199: note = Optimized alpha S1-casein truncated version 1(OaS1-T)
RPKHPIKHQGLPQEVLNENLLRFFVAPFPEVFGKEKVNELSKDIGSESTEDQAMEDIKQMEAESISSSEEIVPNSVEQKHIQKEDVPSERYLGYLEQLLRLKKYKVPQLEIVPNSAEERLHSMKEGIHAQQKEPMIGVNQELAYFYPELFRQFYQLDAYPSGAWYYVPLGTQYTDAPSFSDIPNPIGSENSEKTTMPLW

SEQ ID NO: 9 - DNA, 486 bp, synthetic construct
  misc_feature 1..486: note = Optimized Beta Lactoglobulin 1 (OLG1)
  source 1..486: mol_type = other DNA
ttgatcgtaacacagactatgaagggtcttgatatacagaaggtggccgggacttggtacagtttggcaatggccgcatccgacatctccttgttggacgcacaatcagccccattgcgtgtgtacgtagaagagcttaaaccaactcccgagggggatctggaaattctgctccagaaatgggagaacggtgagtgcgcccagaagaagatcatcgcagagaagaccaaaattccagcagtattcaaaatcgacgcattgaacgaaaataaggtgctcgtactggacactgattataagaagtatctccttttctgtatggagaactcagcagagcctgaacagagtcttgcctgccaatgccttgttcgtaccccagaggtagatgatgaagctctggaaaagttcgataaggcccttaaggctctgcctatgcacattaggctttctttcaatccaactcaacttgaggaacaatgtcacatt

SEQ ID NO: 10 - protein, 162 aa, synthetic construct
  REGION 1..162: note = Optimized Beta Lactoglobulin 1 (OLG1)
LIVTQTMKGLDIQKVAGTWYSLAMAASDISLLDAQSAPLRVYVEELKPTPEGDLEILLQKWENGECAQKKIIAEKTKIPAVFKIDALNENKVLVLDTDYKKYLLFCMENSAEPEQSLACQCLVRTPEVDDEALEKFDKALKALPMHIRLSFNPTQLEEQCHI

SEQ ID NO: 11 - DNA, 486 bp, synthetic construct
  misc_feature 1..486: note = Optimized Beta Lactoglobulin 2 (OLG2)
  source 1..486: mol_type = other DNA
cttattgtgacccaaaccatgaagggcctcgacattcaaaaggttgccggaacctggtactcccttgctatggctgcttccgatatctccttgctcgatgctcaatccgctccacttagggtgtacgtggaagagttgaagccaactccagagggcgatcttgagatcttgcttcaaaagtgggagaacgatgagtgcgcccagaagaagattatcgccgaaaagaccaagattcccgccgtgttcaagatcgatgctctcaacgagaacaaggtgctcgtgctcgataccgactacaagaagtaccttctcgtctgcatggaaaactccgctgagccagagcaatctcttgtttgccaatgccttgtgaggaccccagaggttgacgatgaagctcttgagaagttcgacaaggctctcaaggctttgcctatgcacatccgccttagcttcaacccaactcagcttgaggaacagtgccacatc

SEQ ID NO: 12 - DNA, 486 bp, synthetic construct
  misc_feature 1..486: note = Optimized Beta Lactoglobulin 3 (OLG3)
  source 1..486: mol_type = other DNA
ctcattgttacacaaaccatgaagggtcttgacattcagaaggttgctgggacatggtattcactagcgatggctgcttctgatatctccctgttggatgcacagtctgcccccctgagagtgtatgttgaagaactgaaaccgacacctgaaggagacttggaaattttactccagaaatgggaaaatgatgagtgtgcccaaaagaagataatagccgagaagaccaaaattcctgctgtgtttaagattgatgctttgaatgagaacaaagtactagtcctcgacactgattacaagaaatacttattagtgtgcatggaaaacagcgcagagccagaacaatcacttgtttgtcaatgtttggtccgtactccagaggtagatgatgaagcattggagaaatttgataaagcattgaaggcacttccaatgcatataaggcttagtttcaatcctactcagcttgaagagcaatgccacatc

SEQ ID NO: 13 - DNA, 486 bp, synthetic construct
  misc_feature 1..486: note = Optimized Beta Lactoglobulin 4 (OLG4)
  source 1..486: mol_type = other DNA
cttatagtaactcaaaccatgaagggacttgatatccaaaaagttgcaggaacctggtactcactggctatggcagcttccgacatctccttgttggacgcacaatccgcaccattgcgcgtctacgttgaggagttgaaacctacaccagagggggatcttgagattttgctccagaaatgggagaacgacgagtgtgcccagaaaaaaattatagcagagaagactaaaattcctgctgtttttaagattgatgccctgaacgagaataaggtactggtcctcgacactgattataaaaagtatttgctggtgtgtatggagaacagtgctgaacctgaacagagcctggtctgtcaatgtcttgtaaggacacctgaggttgatgacgaggcacttgaaaaattcgacaaggcccttaaggctctgcctatgcacatccgtctgagtttcaaccctactcagttggaggaacaatgtcatatt

SEQ ID NO: 14 - DNA, 96 bp, Glycine max
  source 1..96: mol_type = other DNA
atggctacttcaaagttgaaaacccagaatgtggttgtatctctctccctaaccttaaccttggtactggtgctactgaccagcaaggcaaactca

SEQ ID NO: 15 - protein, 32 aa, Glycine max
MATSKLKTQNVVVSLSLTLTLVLVLLTSKANS

SEQ ID NO: 16 - DNA, 57 bp, Glycine max
  source 1..57: mol_type = other DNA
atggccaagctagttttttccctttgttttctgcttttcagtggctgctgcttcgct

SEQ ID NO: 17 - protein, 19 aa, Glycine max
MAKLVFSLCFLLFSGCCFA

SEQ ID NO: 18 - DNA, 1543 bp, Glycine max
  source 1..1543: mol_type = other DNA
cattgtactcccagtatcattatagtgaaagttttggctctctcgccggtggttttttacctctatttaaaggggttttccacctaaaaattctggtatcattctcactttacttgttactttaatttctcataatctttggttgaaattatcacgcttccgcacacgatatccctacaaatttattatttgttaaacattttcaaaccgcataaaattttatgaagtcccgtctatctttaatgtagtctaacattttcatattgaaatatataatttacttaattttagcgttggtagaaagcataatgatttattcttattcttcttcatataaatgtttaatatacaatataaacaaattctttaccttaagaaggatttcccattttatattttaaaaatatatttatcaaatatttttcaaccacgtaaatcacataataataagttgtttcaaaagtaataaaatttaactccataatttttttatttgactgatcttaaagcaacacccagtgacacaactagccatttttttctttgaataaaaaaatccaattatcattgtattttttttatacaatgaaaatttcaccaaacaatgatttgtggtatttctgaagcaagtcatgttatgcaaaattctataattcccatttgacactacggaagtaactgaagatctgcttttacatgcgagacacatcttctaaagtaattttaataatagttactatattcaagatttcatatatcaaatactcaatattacttctaaaaaattaattagatataattaaaatattacttttttaattttaagtttaattgttgaatttgtgactattgatttattattctactatgtttaaattgttttataggtagtttaaagtaaatataagtaatgtagtagagtgttagagtgttaccctaaaccataaactataagatttatggtggactaattttcatatatttcttattgcttttaccttttcttggtatgtaagtccgtaactggaattactgtgggttgccatgacactctgtggtcttttggttcatgcatggatgcttgcgcaagaaaaagacaaagaacaaagaaaaaagacaaaacagagagacaaaacgcaatcacacaaccaactcaaattagtcactggctgatcaagatcgccgcgtccatgtatgtctaaatgccatgcaaagcaacacgtgcttaacatgcactttaaatggctcacccatcccaacccactcacaaacacattgcctttttcttcatcatcaccacaaccacctgtatatattcattctcttccgccacctcaatttcttcacttcaacacacgtcaacctgcatatgcgtgtcatcccatgcccaaatctccatgcatgttcctaccaccttctctcttatataatacctataaatacctctaatatcactcacttctttcatcatccatccatccagagtactactactctactactataataccccaacccaactcatattcaatactactctact

SEQ ID NO: 19 - DNA, 1384 bp, Glycine max
  source 1..1384: mol_type = other DNA
aacacaagcttcaagttttaaaaggaaaaatgtcagccaaaaactttaaataaaatggtaacaaggaaattattcaaaaattacaaacctcgtcaaaataggaaagaaaaaaagtttagggatttagaaaaaacatcaatctagttccaccttattttatagagagaagaaactaatatataagaactaaaaaacagaagaatagaaaaaaaaagtattgacaggaaagaaaaagtagctgtatgcttataagtactttgaggatttgaattctctcttataaaacacaaacacaatttttagattttatttaaataatcatcaatccgattataattatttatatatttttctattttcaaagaagtaaatcatgagcttttccaactcaacatctattttttttctctcaacctttttcacatcttaagtagtctcaccctttatatatataacttatttcttaccttttacattatgtaacttttatcaccaaaaccaacaactttaaaattttattaaatagactccacaagtaacttgacactcttacattcatcgacattaacttttatctgttttataaatattattgtgatataatttaatcaaaataaccacaaactttcataaaaggttcttattaagcatggcatttaataagcaaaaacaactcaatcactttcatataggaggtagcctaagtacgtactcaaaatgccaacaaataaaaaaaaagttgctttaataatgccaaaacaaattaataaaacacttacaacaccggattttttttaattaaaatgtgccatttaggataaatagttaatatttttaataattatttaaaaagccgtatctactaaaatgatttttatttggttgaaaatattaatatgtttaaatcaacacaatctatcaaaattaaactaaaaaaaaaataagtgtacgtggttaacattagtacagtaatataagaggaaaatgagaaattaagaaattgaaagcgagtctaatttttaaattatgaacctgcatatataaaaggaaagaaagaatccaggaagaaaagaaatgaaaccatgcatggtcccctcgtcatcacgagtttctgccatttgcaatagaaacactgaaacacctttctctttgtcacttaattgagatgccgaagccacctcacaccatgaacttcatgaggtgtagcacccaaggcttccatagccatgcatactgaagaatgtctcaagctcagcaccctacttctgtgacgtgtccctcattcaccttcctctcttccctataaataaccacgcctcaggttctccgcttcacaactcaaacattctctccattggtccttaaacactcatcagtcatcacc

SEQ ID NO: 20 - DNA, 13 bp, Glycine max
  source 1..13: mol_type = other DNA
tgaatgcatgatc

SEQ ID NO: 21 - DNA, 1197 bp, Glycine max
  source 1..1197: mol_type = other DNA
aataaataaaatgggagcaataaataaaatgggagctcatatatttacaccatttacactgtctattattcaccatgccaattattacttcataattttaaaattatgtcatttttaaaaattgcttaatgatggaaaggattattataagttaaaagtataacatagataaactaaccacaaaacaaatcaatataaactaacttactctcccatctaatttttatttaaatttctttacacttctcttccatttctatttctacaacattatttaacatttttattgtatttttcttactttctaactctattcatttcaaaaatcaatatatgtttatcaccacctctctaaaaaaaactttacaatcattggtccagaaaagttaaatcacgagatggtcattttagcattaaaacaacgattcttgtatcactatttttcagcatgtagtccattctcttcaaacaaagacagcggctatataatcgttgtgttatattcagtctaaaacaattgttatggtaaaagtcgtcattttacgcctttttaaaagatataaaatgacagttatggttaaaagtcatcatgttagatcctccttaaagatataaaatgacagttttggataaaaagtggtcattttatacgctcttgaaagatataaaacgacggttatggtaaaagctgccattttaaatgaaatatttttgttttagttcattttgtttaatgctaatcccatttaaattgacttgtacaattaaaactcacccacccagatacaatataaactaacttactctcacagctaagttttatttaaatttctttacacttcttttccatttctatttctatgacattaactaacatttttctcgtaattttttttcttattttctaactctatccatttcaaatcgatatatgtttatcaccaccactttaaaaagaaaatttacaatttctcgtgcaaaaaagctaaatcatgaccgtcattttagcattaaaacaacgattcttgtatcgttgtttttcagcatgtagtccattcttttcaagcaaagacaacagctatataatcatcgtgttatattcagtctaaaacaacagtaatgataaaagtcatcattttaggcctttctgaaatatatagaacgacattcatggtaaaaaatcgtcattttagatcc

SEQ ID NO: 22 - DNA, 253 bp, Glycine max
  source 1..253: mol_type = other DNA
gatcgttcaaacatttggcaataaagtttcttaagattgaatcctgttgccggtcttgcgatgattatcatataatttctgttgaattacgttaagcatgtaataattaacatgtaatgcatgacgttatttatgagatgggtttttatgattagagtcccgcaattatacatttaatacgcgatagaaaacaaaatatagcgcgcaaactaggataaattatcgcgcgcggtgtcatctatgttactagatc

SEQ ID NO: 23 - protein, 4 aa, unidentified
  REGION 1..4: note = Carboxy-terminal endoplasmic reticulum retention/retrieval signal
KDEL

SEQ ID NO: 24 - protein, 4 aa, unidentified
  REGION 1..4: note = Carboxy-terminal endoplasmic reticulum retention/retrieval signal
HDEL

SEQ ID NO: 25 - protein, 4 aa, unidentified
  REGION 1..4: note = Carboxy-terminal endoplasmic reticulum retention/retrieval signal
HDEF

SEQ ID NO: 26 - protein, 4 aa, unidentified
  REGION 1..4: note = Carboxy-terminal endoplasmic reticulum retention/retrieval signal
RDEF

SEQ ID NO: 27 - protein, 4 aa, unidentified
  REGION 1..4: note = Carboxy-terminal endoplasmic reticulum retention/retrieval signal
RDEL

SEQ ID NO: 28 - protein, 4 aa, unidentified
  REGION 1..4: note = Carboxy-terminal endoplasmic reticulum retention/retrieval signal
WDEL

SEQ ID NO: 29 - protein, 4 aa, unidentified
  REGION 1..4: note = Carboxy-terminal endoplasmic reticulum retention/retrieval signal
YDEL

SEQ ID NO: 30 - protein, 4 aa, unidentified
  REGION 1..4: note = Carboxy-terminal endoplasmic reticulum retention/retrieval signal
HEEF

SEQ ID NO: 31 - protein, 4 aa, unidentified
  REGION 1..4: note = Carboxy-terminal endoplasmic reticulum retention/retrieval signal
HEEL

SEQ ID NO: 32 - protein, 4 aa, unidentified
  REGION 1..4: note = Carboxy-terminal endoplasmic reticulum retention/retrieval signal
KEEL

SEQ ID NO: 33 - protein, 4 aa, unidentified
  REGION 1..4: note = Carboxy-terminal endoplasmic reticulum retention/retrieval signal
REEL

SEQ ID NO: 34 - protein, 4 aa, unidentified
  REGION 1..4: note = Carboxy-terminal endoplasmic reticulum retention/retrieval signal
KAEL

SEQ ID NO: 35 - protein, 4 aa, unidentified
  REGION 1..4: note = Carboxy-terminal endoplasmic reticulum retention/retrieval signal
KCEL

SEQ ID NO: 36 - protein, 4 aa, unidentified
  REGION 1..4: note = Carboxy-terminal endoplasmic reticulum retention/retrieval signal
KFEL

SEQ ID NO: 37 - protein, 4 aa, unidentified
  REGION 1..4: note = Carboxy-terminal endoplasmic reticulum retention/retrieval signal
KGEL

SEQ ID NO: 38 - protein, 4 aa, unidentified
  REGION 1..4: note = Carboxy-terminal endoplasmic reticulum retention/retrieval signal
KHEL

SEQ ID NO: 39 - protein, 4 aa, unidentified
  REGION 1..4: note = Carboxy-terminal endoplasmic reticulum retention/retrieval signal
KLEL

SEQ ID NO: 40 - protein, 4 aa, unidentified
  REGION 1..4: note = Carboxy-terminal endoplasmic reticulum retention/retrieval signal
KNEL

SEQ ID NO: 41 - protein, 4 aa, unidentified
  REGION 1..4: note = Carboxy-terminal endoplasmic reticulum retention/retrieval signal
KQEL

SEQ ID NO: 42 - protein, 4 aa, unidentified
  REGION 1..4: note = Carboxy-terminal endoplasmic reticulum retention/retrieval signal
KREL

SEQ ID NO: 43 - protein, 4 aa, unidentified
  REGION 1..4: note = Carboxy-terminal endoplasmic reticulum retention/retrieval signal
KSEL

SEQ ID NO: 44 - protein, 4 aa, unidentified
  REGION 1..4: note = Carboxy-terminal endoplasmic reticulum retention/retrieval signal
KVEL

SEQ ID NO: 45 - protein, 4 aa, unidentified
  REGION 1..4: note = Carboxy-terminal endoplasmic reticulum retention/retrieval signal
KWEL

SEQ ID NO: 46 - protein, 4 aa, unidentified
  REGION 1..4: note = Carboxy-terminal endoplasmic reticulum retention/retrieval signal
KYEL

SEQ ID NO: 47 - protein, 4 aa, unidentified
  REGION 1..4: note = Carboxy-terminal endoplasmic reticulum retention/retrieval signal
KEDL

SEQ ID NO: 48 - protein, 4 aa, unidentified
  REGION 1..4: note = Carboxy-terminal endoplasmic reticulum retention/retrieval signal
KIEL

SEQ ID NO: 49 - protein, 4 aa, unidentified
  REGION 1..4: note = Carboxy-terminal endoplasmic reticulum retention/retrieval signal
DKEL

SEQ ID NO: 50 - protein, 4 aa, unidentified
  REGION 1..4: note = Carboxy-terminal endoplasmic reticulum retention/retrieval signal
FDEL

SEQ ID NO: 51 - protein, 4 aa, unidentified
  REGION 1..4: note = Carboxy-terminal endoplasmic reticulum retention/retrieval signal
KDEF

SEQ ID NO: 52 - protein, 4 aa, unidentified
  REGION 1..4: note = Carboxy-terminal endoplasmic reticulum retention/retrieval signal
KKEL

SEQ ID NO: 53 - protein, 4 aa, unidentified
  REGION 1..4: note = Carboxy-terminal endoplasmic reticulum retention/retrieval signal
HADL

SEQ ID NO: 54 - protein, 4 aa, unidentified
  REGION 1..4: note = Carboxy-terminal endoplasmic reticulum retention/retrieval signal
HAEL

SEQ ID NO: 55 - protein, 4 aa, unidentified
  REGION 1..4: note = Carboxy-terminal endoplasmic reticulum retention/retrieval signal
HIEL

SEQ ID NO: 56 - protein, 4 aa, unidentified
  REGION 1..4: note = Carboxy-terminal endoplasmic reticulum retention/retrieval signal
HNEL

SEQ ID NO: 57 - protein, 4 aa, unidentified
  REGION 1..4: note = Carboxy-terminal endoplasmic reticulum retention/retrieval signal
HTEL

SEQ ID NO: 58 - protein, 4 aa, unidentified
  REGION 1..4: note = Carboxy-terminal endoplasmic reticulum retention/retrieval signal
KTEL

SEQ ID NO: 59 - protein, 4 aa, unidentified
  REGION 1..4: note = Carboxy-terminal endoplasmic reticulum retention/retrieval signal
HVEL

SEQ ID NO: 60 - protein, 4 aa, unidentified
  REGION 1..4: note = Carboxy-terminal endoplasmic reticulum retention/retrieval signal
NDEL

SEQ ID NO: 61 - protein, 4 aa, unidentified
  REGION 1..4: note = Carboxy-terminal endoplasmic reticulum retention/retrieval signal
QDEL

SEQ ID NO: 62 - protein, 4 aa, unidentified
  REGION 1..4: note = Carboxy-terminal endoplasmic reticulum retention/retrieval signal
REDL

SEQ ID NO: 63 - protein, 4 aa, unidentified
  REGION 1..4: note = Carboxy-terminal endoplasmic reticulum retention/retrieval signal
RNEL

SEQ ID NO: 64 - protein, 4 aa, unidentified
  REGION 1..4: note = Carboxy-terminal endoplasmic reticulum retention/retrieval signal
RTDL

SEQ ID NO: 65 - protein, 4 aa, unidentified
  REGION 1..4: note = Carboxy-terminal endoplasmic reticulum retention/retrieval signal
RTEL

SEQ ID NO: 66 - protein, 4 aa, unidentified
  REGION 1..4: note = Carboxy-terminal endoplasmic reticulum retention/retrieval signal
SDEL

SEQ ID NO: 67 - protein, 4 aa, unidentified
  REGION 1..4: note = Carboxy-terminal endoplasmic reticulum retention/retrieval signal
TDEL

SEQ ID NO: 68 - protein, 4 aa, unidentified
  REGION 1..4: note = Carboxy-terminal endoplasmic reticulum retention/retrieval signal
SKEL

SEQ ID NO: 69 - protein, 4 aa, unidentified
  REGION 1..4: note = Carboxy-terminal endoplasmic reticulum retention/retrieval signal
STEL

SEQ ID NO: 70 - protein, 4 aa, unidentified
  REGION 1..4: note = Carboxy-terminal endoplasmic reticulum retention/retrieval signal
EDEL

SEQ ID NO: 71 - protein, 367 aa, synthetic construct
  REGION 1..367: note = Fusion protein sig10:OKC1-T:OLG1:KDEL
MATSKLKTQNVVVSLSLTLTLVLVLLTSKANSQEQNQEQPIRCEKDERFFSDKIAKYIPIQYVLSRYPSYGLNYYQQKPVALINNQFLPYPYYAKPAAVRSPAQILQWQVLSNTVPAKSCQAQPTTMARHPHPHLSFMAIPPKKNQDKTEIPTINTIASGEPTSTPTTEAVESTVATLEDSPEVIESPPEINTVQVTSTAVLIVTQTMKGLDIQKVAGTWYSLAMAASDISLLDAQSAPLRVYVEELKPTPEGDLEILLQKWENGECAQKKIIAEKTKIPAVFKIDALNENKVLVLDTDYKKYLLFCMENSAEPEQSLACQCLVRTPEVDDEALEKFDKALKALPMHIRLSFNPTQLEEQCHIKDEL

SEQ ID NO: 72 - DNA, 1104 bp, synthetic construct
  misc_feature 1..1104: note = Nucleic acid sequence encoding fusion proteinsig10:OKC1-T:OLG1:KDEL
  source 1..1104: mol_type = other DNA
atggctacttcaaagttgaaaacccagaatgtggttgtatctctctccctaaccttaaccttggtactggtgctactgaccagcaaggcaaactcacaagagcagaatcaagagcagccaatccgttgtgagaaggacgagaggttcttctcagacaagatcgccaaatatatacccatacaatatgtactctcacgctaccctagctacgggcttaactactatcagcaaaaacctgtagcactgataaataaccagtttctcccctatccctattatgctaaacctgccgccgtgaggagtccagcacaaatacttcagtggcaagtgctcagtaacaccgtgccagcaaaaagctgccaggctcagcccaccacaatggcccgtcatccccatcctcaccttagcttcatggcaatcccaccaaagaagaatcaagacaagaccgaaatacctaccatcaacacaattgcatctggagagcctaccagtacaccaacaactgaggcagtagagtctactgttgctacccttgaggacagccccgaggttatagagtccccacctgagataaataccgtgcaggtgacaagtaccgccgtattgatcgtaacacagactatgaagggtcttgatatacagaaggtggccgggacttggtacagtttggcaatggccgcatccgacatctccttgttggacgcacaatcagccccattgcgtgtgtacgtagaagagcttaaaccaactcccgagggggatctggaaattctgctccagaaatgggagaacggtgagtgcgcccagaagaagatcatcgcagagaagaccaaaattccagcagtattcaaaatcgacgcattgaacgaaaataaggtgctcgtactggacactgattataagaagtatctccttttctgtatggagaactcagcagagcctgaacagagtcttgcctgccaatgccttgttcgtaccccagaggtagatgatgaagctctggaaaagttcgataaggcccttaaggctctgcctatgcacattaggctttctttcaatccaactcaacttgaggaacaatgtcacattaaggatgagctttaa

SEQ ID NO: 73 - protein, 405 aa, synthetic construct
  REGION 1..405: note = Fusion protein sig10:OBC-T2:FM:OLG1
MATSKLKTQNVVVSLSLTLTLVLVLLTSKANSRELEELNVPGEIVESLSSSEESITRINKKIEKFQSEEQQQTEDELQDKIHPFAQTQSLVYPFPGPIPNSLPQNIPPLTQTPVVVPPFLQPEVMGVSKVKEAMAPKHKEMPFPKYPVEPFTESQSLTLTDVENLHLPLPLLQSWMHQPHQPLPPTVMFPPQSVLSLSQSKVLPVPQKAVPYPQRDMPIQAFLLYQEPVLGPVRGPFPIIVFMLIVTQTMKGLDIQKVAGTWYSLAMAASDISLLDAQSAPLRVYVEELKPTPEGDLEILLQKWENGECAQKKIIAEKTKIPAVFKIDALNENKVLVLDTDYKKYLLFCMENSAEPEQSLACQCLVRTPEVDDEALEKFDKALKALPMHIRLSFNPTQLEEQCHI

SEQ ID NO: 74 - DNA, 1218 bp, synthetic construct
  misc_feature 1..1218: note = Nucleic acid encoding fusion protein sig10:OBC-T2:FM:OLG1
  source 1..1218: mol_type = other DNA
atggctacttcaaagttgaaaacccagaatgtggttgtatctctctccctaaccttaaccttggtactggtgctactgaccagcaaggcaaactcacgcgaactggaagagttgaacgtaccaggagagattgtagaatcactgagctcctcagaggagtctattactcgtatcaacaagaagatagagaagttccaatccgaggagcaacaacaaacagaggacgaattgcaggacaagatacatcctttcgcacagacccagagcctcgtctatccctttccaggtccaatccctaactctctcccccagaatatcccacccttgactcagactcccgtggtcgtaccccctttcttgcaacccgaggtgatgggggtttctaaagtcaaagaggctatggctcctaaacataaggaaatgccttttcccaaatatccagtggagccattcactgagagccagtctctgacacttacagatgtggaaaacttgcacctgcccttgccacttttgcagtcctggatgcaccaaccacatcaacccttgccccccacagtgatgtttcctccacaatcagttcttagtctctcccaaagcaaagtccttccagtgcctcagaaggccgtcccatacccccagagagatatgccaatacaggcattcttgctttaccaggaaccagtgctcggtcctgtacgtggcccattccctatcatagtgttcatgttgatcgtaacacagactatgaagggtcttgatatacagaaggtggccgggacttggtacagtttggcaatggccgcatccgacatctccttgttggacgcacaatcagccccattgcgtgtgtacgtagaagagcttaaaccaactcccgagggggatctggaaattctgctccagaaatgggagaacggtgagtgcgcccagaagaagatcatcgcagagaagaccaaaattccagcagtattcaaaatcgacgcattgaacgaaaataaggtgctcgtactggacactgattataagaagtatctccttttctgtatggagaactcagcagagcctgaacagagtcttgcctgccaatgccttgttcgtaccccagaggtagatgatgaagctctggaaaagttcgataaggcccttaaggctctgcctatgcacattaggctttctttcaatccaactcaacttgaggaacaatgtcacatttaa

SEQ ID NO: 75 - protein, 395 aa, synthetic construct
  REGION 1..395: note = Fusion protein sig10:OaS1-T:FM:OLG1
MATSKLKTQNVVVSLSLTLTLVLVLLTSKANSRPKHPIKHQGLPQEVLNENLLRFFVAPFPEVFGKEKVNELSKDIGSESTEDQAMEDIKQMEAESISSSEEIVPNSVEQKHIQKEDVPSERYLGYLEQLLRLKKYKVPQLEIVPNSAEERLHSMKEGIHAQQKEPMIGVNQELAYFYPELFRQFYQLDAYPSGAWYYVPLGTQYTDAPSFSDIPNPIGSENSEKTTMPLWFMLIVTQTMKGLDIQKVAGTWYSLAMAASDISLLDAQSAPLRVYVEELKPTPEGDLEILLQKWENGECAQKKIIAEKTKIPAVFKIDALNENKVLVLDTDYKKYLLFCMENSAEPEQSLACQCLVRTPEVDDEALEKFDKALKALPMHIRLSFNPTQLEEQCHI

SEQ ID NO: 76 - DNA, 1188 bp, synthetic construct
  misc_feature 1..1188: note = Nucleic acid encoding fusion protein sig10:OaS1-T:FM:OLG1
  source 1..1188: mol_type = other DNA
atggctacttcaaagttgaaaacccagaatgtggttgtatctctctccctaaccttaaccttggtactggtgctactgaccagcaaggcaaactcacgcccaaaacatcccataaaacatcaaggattgccccaggaagtactcaacgagaatctcctccgttttttcgttgctcctttccccgaagtgttcgggaaggaaaaagtaaacgagctttcaaaggacatcggctctgaaagtaccgaggatcaggctatggaagatatcaagcaaatggaggccgaatctataagttcttcagaagaaatagttcccaactcagtggagcagaagcacattcagaaagaagacgtgcccagcgagcgctatctgggatatttggaacagctgctcagactgaaaaagtacaaggtgcctcagctcgaaatcgtacccaatagtgctgaagaaaggttgcactcaatgaaagaggggattcacgcacaacaaaaagagcctatgatcggagtaaatcaagaactggcatacttttatcccgagttgtttcgccaattctatcaactggatgcctacccttccggtgcatggtactacgtacccctcggtactcaatataccgatgctccctccttttccgacattcctaatcctataggttccgagaatagcgaaaagaccaccatgcccttatggttcatgttgatcgtaacacagactatgaagggtcttgatatacagaaggtggccgggacttggtacagtttggcaatggccgcatccgacatctccttgttggacgcacaatcagccccattgcgtgtgtacgtagaagagcttaaaccaactcccgagggggatctggaaattctgctccagaaatgggagaacggtgagtgcgcccagaagaagatcatcgcagagaagaccaaaattccagcagtattcaaaatcgacgcattgaacgaaaataaggtgctcgtactggacactgattataagaagtatctccttttctgtatggagaactcagcagagcctgaacagagtcttgcctgccaatgccttgttcgtaccccagaggtagatgatgaagctctggaaaagttcgataaggcccttaaggctctgcctatgcacattaggctttctttcaatccaactcaacttgaggaacaatgtcacatttaa

SEQ ID NO: 77 - protein, 304 aa, synthetic construct
  REGION 1..304: note = Fusion protein sig10:paraOKC1-T:FM:OLG1:KDEL
MATSKLKTQNVVVSLSLTLTLVLVLLTSKANSQEQNQEQPIRCEKDERFFSDKIAKYIPIQYVLSRYPSYGLNYYQQKPVALINNQFLPYPYYAKPAAVRSPAQILQWQVLSNTVPAKSCQAQPTTMARHPHPHLSFMLIVTQTMKGLDIQKVAGTWYSLAMAASDISLLDAQSAPLRVYVEELKPTPEGDLEILLQKWENGECAQKKIIAEKTKIPAVFKIDALNENKVLVLDTDYKKYLLFCMENSAEPEQSLACQCLVRTPEVDDEALEKFDKALKALPMHIRLSFNPTQLEEQCHIKDEL

SEQ ID NO: 78 - DNA, 915 bp, synthetic construct
  misc_feature 1..915: note = Nucleic acid encoding fusion proteinsig10:paraOKC1-T:FM:OLG1:KDEL
  source 1..915: mol_type = other DNA
atggctacttcaaagttgaaaacccagaatgtggttgtatctctctccctaaccttaaccttggtactggtgctactgaccagcaaggcaaactcacaagagcagaatcaagagcagccaatccgttgtgagaaggacgagaggttcttctcagacaagatcgccaaatatatacccatacaatatgtactctcacgctaccctagctacgggcttaactactatcagcaaaaacctgtagcactgataaataaccagtttctcccctatccctattatgctaaacctgccgccgtgaggagtccagcacaaatacttcagtggcaagtgctcagtaacaccgtgccagcaaaaagctgccaggctcagcccaccacaatggcccgtcatccccatcctcaccttagcttcatgttgatcgtaacacagactatgaagggtcttgatatacagaaggtggccgggacttggtacagtttggcaatggccgcatccgacatctccttgttggacgcacaatcagccccattgcgtgtgtacgtagaagagcttaaaccaactcccgagggggatctggaaattctgctccagaaatgggagaacggtgagtgcgcccagaagaagatcatcgcagagaagaccaaaattccagcagtattcaaaatcgacgcattgaacgaaaataaggtgctcgtactggacactgattataagaagtatctccttttctgtatggagaactcagcagagcctgaacagagtcttgcctgccaatgccttgttcgtaccccagaggtagatgatgaagctctggaaaagttcgataaggcccttaaggctctgcctatgcacattaggctttctttcaatccaactcaacttgaggaacaatgtcacattaaggatgagctttaa

SEQ ID NO: 79 - protein, 300 aa, synthetic construct
  REGION 1..300: note = Fusion protein sig10:paraOKC1-T:FM:OLG1
MATSKLKTQNVVVSLSLTLTLVLVLLTSKANSQEQNQEQPIRCEKDERFFSDKIAKYIPIQYVLSRYPSYGLNYYQQKPVALINNQFLPYPYYAKPAAVRSPAQILQWQVLSNTVPAKSCQAQPTTMARHPHPHLSFMLIVTQTMKGLDIQKVAGTWYSLAMAASDISLLDAQSAPLRVYVEELKPTPEGDLEILLQKWENGECAQKKIIAEKTKIPAVFKIDALNENKVLVLDTDYKKYLLFCMENSAEPEQSLACQCLVRTPEVDDEALEKFDKALKALPMHIRLSFNPTQLEEQCHI

SEQ ID NO: 80 - DNA, 903 bp, synthetic construct
  misc_feature 1..903: note = Nucleic acid encoding fusion protein sig10:paraOKC1-T:FM:OLG1
  source 1..903: mol_type = other DNA
atggctacttcaaagttgaaaacccagaatgtggttgtatctctctccctaaccttaaccttggtactggtgctactgaccagcaaggcaaactcacaagagcagaatcaagagcagccaatccgttgtgagaaggacgagaggttcttctcagacaagatcgccaaatatatacccatacaatatgtactctcacgctaccctagctacgggcttaactactatcagcaaaaacctgtagcactgataaataaccagtttctcccctatccctattatgctaaacctgccgccgtgaggagtccagcacaaatacttcagtggcaagtgctcagtaacaccgtgccagcaaaaagctgccaggctcagcccaccacaatggcccgtcatccccatcctcaccttagcttcatgttgatcgtaacacagactatgaagggtcttgatatacagaaggtggccgggacttggtacagtttggcaatggccgcatccgacatctccttgttggacgcacaatcagccccattgcgtgtgtacgtagaagagcttaaaccaactcccgagggggatctggaaattctgctccagaaatgggagaacggtgagtgcgcccagaagaagatcatcgcagagaagaccaaaattccagcagtattcaaaatcgacgcattgaacgaaaataaggtgctcgtactggacactgattataagaagtatctccttttctgtatggagaactcagcagagcctgaacagagtcttgcctgccaatgccttgttcgtaccccagaggtagatgatgaagctctggaaaagttcgataaggcccttaaggctctgcctatgcacattaggctttctttcaatccaactcaacttgaggaacaatgtcacatttaa

SEQ ID NO: 81 - protein, 354 aa, synthetic construct
  REGION 1..354: note = Fusion protein sig2:OKC1-T:OLG1:KDEL
MAKLVFSLCFLLFSGCCFAQEQNQEQPIRCEKDERFFSDKIAKYIPIQYVLSRYPSYGLNYYQQKPVALINNQFLPYPYYAKPAAVRSPAQILQWQVLSNTVPAKSCQAQPTTMARHPHPHLSFMAIPPKKNQDKTEIPTINTIASGEPTSTPTTEAVESTVATLEDSPEVIESPPEINTVQVTSTAVLIVTQTMKGLDIQKVAGTWYSLAMAASDISLLDAQSAPLRVYVEELKPTPEGDLEILLQKWENGECAQKKIIAEKTKIPAVFKIDALNENKVLVLDTDYKKYLLFCMENSAEPEQSLACQCLVRTPEVDDEALEKFDKALKALPMHIRLSFNPTQLEEQCHIKDEL

SEQ ID NO: 82 - DNA, 1065 bp, synthetic construct
  misc_feature 1..1065: note = Nucleic acid encoding fusion protein sig2:OKC1-T:OLG1:KDEL
  source 1..1065: mol_type = other DNA
atggccaagctagttttttccctttgttttctgcttttcagtggctgctgcttcgctcaagagcagaatcaagagcagccaatccgttgtgagaaggacgagaggttcttctcagacaagatcgccaaatatatacccatacaatatgtactctcacgctaccctagctacgggcttaactactatcagcaaaaacctgtagcactgataaataaccagtttctcccctatccctattatgctaaacctgccgccgtgaggagtccagcacaaatacttcagtggcaagtgctcagtaacaccgtgccagcaaaaagctgccaggctcagcccaccacaatggcccgtcatccccatcctcaccttagcttcatggcaatcccaccaaagaagaatcaagacaagaccgaaatacctaccatcaacacaattgcatctggagagcctaccagtacaccaacaactgaggcagtagagtctactgttgctacccttgaggacagccccgaggttatagagtccccacctgagataaataccgtgcaggtgacaagtaccgccgtattgatcgtaacacagactatgaagggtcttgatatacagaaggtggccgggacttggtacagtttggcaatggccgcatccgacatctccttgttggacgcacaatcagccccattgcgtgtgtacgtagaagagcttaaaccaactcccgagggggatctggaaattctgctccagaaatgggagaacggtgagtgcgcccagaagaagatcatcgcagagaagaccaaaattccagcagtattcaaaatcgacgcattgaacgaaaataaggtgctcgtactggacactgattataagaagtatctccttttctgtatggagaactcagcagagcctgaacagagtcttgcctgccaatgccttgttcgtaccccagaggtagatgatgaagctctggaaaagttcgataaggcccttaaggctctgcctatgcacattaggctttctttcaatccaactcaacttgaggaacaatgtcacattaaggatgagctttaa

SEQ ID NO: 83 - protein, 621 aa, synthetic construct
  REGION 1..621: note = Optimized alpha S2-casein truncated version 1(OaS2-T)
AAGAATACTATGGAACACGTAAGCTCAAGTGAAGAATCTATAATAAGTCAAGAGACATATAAGCAAGAGAAAAACATGGCAATAAATCCCTCCAAGGAGAATCTTTGTAGCACTTTTTGCAAAGAAGTTGTGAGAAATGCAAATGAGGAAGAATACTCAATAGGCAGCTCTTCCGAAGAATCTGCTGAAGTCGCTACTGAAGAGGTCAAAATAACAGTTGACGACAAGCATTATCAAAAAGCCCTGAATGAAATAAACCAGTTCTACCAAAAATTTCCCCAATACCTCCAGTACCTTTATCAAGGACCCATAGTCCTCAACCCTTGGGATCAGGTCAAGCGTAATGCTGTTCCAATAACACCAACACTCAATCGTGAACAACTGTCTACCTCAGAAGAAAATTCCAAAAAAACTGTGGATATGGAAAGTACAGAAGTTTTTACTAAAAAGACCAAGCTCACCGAGGAGGAAAAAAATAGATTGAATTTTCTTAAGAAGATCAGTCAACGCTATCAGAAGTTCGCCCTTCCACAATACCTCAAGACTGTATACCAACATCAGAAGGCCATGAAGCCTTGGATTCAGCCCAAAACAAAGGTAATCCCCTATGTTAGATACTTG

SEQ ID NO: 84 - protein, 207 aa, synthetic construct
  REGION 1..207: note = Optimized alpha S2-casein truncated version 1(OaS2-T)
KNTMEHVSSSEESIISQETYKQEKNMAINPSKENLCSTFCKEVVRNANEEEYSIGSSSEESAEVATEEVKITVDDKHYQKALNEINQFYQKFPQYLQYLYQGPIVLNPWDQVKRNAVPITPTLNREQLSTSEENSKKTVDMESTEVFTKKTKLTEEEKNRLNFLKKISQRYQKFALPQYLKTVYQHQKAMKPWIQPKTKVIPYVRYL

SEQ ID NO: 85 - protein, 171 aa, Capra hircus
QEQNQEQPICCEKDERFFDDKIAKYIPIQYVLSRYPSYGLNYYQQRPVALINNQFLPYPYYAKPVAVRSPAQTLQWQVLPNTVPAKSCQDQPTTLARHPHPHLSFMAIPPKKDQDKTEVPAINTIASAEPTVHSTPTTEAIVNTVDNPEASSESIASASETNTAQVTSTEV

SEQ ID NO: 86 - protein, 171 aa, Ovis aries
QEQNQEQRICCEKDERFFDDKIAKYIPIQYVLSRYPSYGLNYYQQRPVALINNQFLPYPYYAKPVAVRSPAQTLQWQVLPNAVPAKSCQDQPTAMARHPHPHLSFMAIPPKKDQDKTEIPAINTIASAEPTVHSTPTTEAVVNAVDNPEASSESIASAPETNTAQVTSTEV

SEQ ID NO: 87 - protein, 165 aa, Bubalus bubalis
QEQNQEQPIRCEKEERFFNDKIAKYIPIQYVLSRYPSYGLNYYQQKPVALINNQFLPYPYYAKPAAVRSPAQILQWQVLPNTVPAKSCQAQPTTMTRHPHPHLSFMAIPPKKNQDKTEIPTINTIVSVEPTSTPTTEAIENTVATLEASSEVIESVPETNTAQVT

SEQ ID NO: 88 - protein, 162 aa, Camelus dromedaries
EVQNQEQPTCFEKVERLLNEKTVKYFPIQFVQSRYPSYGINYYQHRLAVPINNQFIPYPNYAKPVAIRLHAQIPQCQALPNIDPPTVERRPRPRPSFIAIPPKKTQDKTVNPAINTVATVEPPVIPTAEPAVNTVVIAEASSEFITTSTPETTTVQITSTEI

SEQ ID NO: 89 - protein, 162 aa, Camelus bactrianus
EVQNQEQPTCCEKVERLLNEKTVKYFPIQFVQSRYPSYGINYYQHRLAVPINNQFIPYPNYAKPVAIRLHAQIPQCQALPNIDPPTVERRPRPRPSFIAIPPKKTQDKTVNPAINTVATVEPPVIPTAEPAVNTVVIAEASSEFITTSTPETTTVQITSTEI

SEQ ID NO: 90 - protein, 173 aa, Bos mutus
QEQNQEQPIRCEKDERFFSDKIAKYIPIQYVLSRYPSYGLNYYQQKPVALINNQFLPYPYYAKPAAVRSPAQILQWQVLSNTVPAKSCQAQPTTMARHPHPHLSFMAIPPKKNQDKTEIPTINTIASGEPTSTPTTEAVESTVATLEASPEASPEVIESPPEINTVQVTSTAV

SEQ ID NO: 91 - protein, 165 aa, Equus caballus
EVQNQEQPTCHKNDERFFDLKTVKYIPIYYVLNSSPRYEPIYYQHRLALLINNQHMPYQYYARPAAVRPHVQIPQWQVLPNIYPSTVVRHPCPHPSFIAIPPKKLQEITVIPKINTIATVEPTPIPTPEPTVNNAVIPDASSEFIIASTPETTTVPVTSPVVQKL

SEQ ID NO: 92 - protein, 162 aa, Equus asinus
EVQNQEQPTCRKNDERFFDLKTVKYIPIYYVLNSSPRNEPIYYQHRLAVLINNQHMPYQYYARPAAVRPHVQIPQWQVLPNIYPSTVVRHPRPHPSFIAIPPKKLQEKTVIPKINTIATVEPTPIPTPEPTVNNAVIPDASSEFIIASTPETTTVPVTSPVV

SEQ ID NO: 93 - protein, 122 aa, Rangifer tarandus
VALINNQFLPYPYYAKPGAVRSPAQILQWQVLPNTVPAKSCQAQPTTLARHPHPRLSFMAIPPKKNQDKTDIPTINTIATVESTITPTTEAIVDTVATLEASSEVIESAPETNTDQVTSTVV

SEQ ID NO: 94 - protein, 141 aa, Alces alces
KIVKYIPIQYALSRYPSYGLSYYQHRPVALINNQFLPYPYYAKPGAVRSPAQILQWQVLPNTVPAKSCQAQPTTMARHPRPRLSFMAIPPKKNQDKTDIPTINTIATVESTITPTTEAIEDNVATLEASSEVIESAPETNT

SEQ ID NO: 95 - protein, 162 aa, Vicugna pacos
EVQNQEQPTCCEKVERLLNEKTVKYFPIQFVQSRYPSYGINYYQHRLAVPINNQFIPYPNYAKPVAIRLHAQIPQCQALPNIDPPTVERRPRPRPSFIAIPPKKTQDKTVIPAINTVATAEPPVIPTAEPVVNTVVIAEASSEFITTSTPETTTVQITSTEI

SEQ ID NO: 96 - protein, 160 aa, Bos indicus
RCEKDERFFSDKIAKYIPIQYVLSRYPSYGLNYYQQKPVALINNQFLPYPYYAKPAAVRSPAQILQWQVLSNTVPAKSCQAQPTTMARHPHPHLSFMAIPPKKNQDKTEIPTINTIASGEPTSTPTTEAVESTVATLEDSPEVIESPPEINTVQVTSTAV

SEQ ID NO: 97 - protein, 162 aa, Lama glama
EVQNQEQPTCCEKVERLLNEKTVKYFPIQFVQSRYPSYGINYYQHRLAVPINNQFIPYPNYAKPVAIRLHAQIPQCQALPNIDPPTVERRPRPRPSFIAIPPKKTQDKTVIPAINTVATVEPPVIPTAEPVVNTVVIAEASSEFITTSTPETTTVQITSTEI

SEQ ID NO: 98 - protein, 162 aa, Homo sapiens
EVQNQKQPACHENDERPFYQKTAPYVPMYYVPNSYPYYGTNLYQRRPAIAINNPYVPRTYYANPAVVRPHAQIPQRQYLPNSHPPTVVRRPNLHPSFIAIPPKKIQDKIIIPTINTIATVEPTPAPATEPTVDSVVTPEAFSESIITSTPETTTVAVTPPTA

SEQ ID NO: 99 - protein, 199 aa, Capra hircus
RPKHPINHRGLSPEVPNENLLRFVVAPFPEVFRKENINELSKDIGSESTEDQAMEDAKQMKAGSSSSSEEIVPNSAEQKYIQKEDVPSERYLGYLEQLLRLKKYNVPQLEIVPKSAEEQLHSMKEGNPAHQKQPMIAVNQELAYFYPQLFRQFYQLDAYPSGAWYYLPLGTQYTDAPSFSDIPNPIGSENSGKTTMPLW

SEQ ID NO: 100 - protein, 199 aa, Ovis aris
RPKHPIKHQGLSSEVLNENLLRFVVAPFPEVFRKENINELSKDIGSESIEDQAMEDAKQMKAGSSSSSEEIVPNSAEQKYIQKEDVPSERYLGYLEQLLRLKKYNVPQLEIVPKSAEEQLHSMKEGNPAHQKQPMIAVNQELAYFYPQLFRQFYQLDAYPSGAWYYLPLGTQYTDAPSFSDIPNPIGSENSGKITMPLW

SEQ ID NO: 101 - protein, 199 aa, Bubalus bubalis
RPKQPIKHQGLPQGVLNENLLRFFVAPFPEVFGKEKVNELSTDIGSESTEDQAMEDIKQMEAESISSSEEIVPISVEQKHIQKEDVPSERYLGYLEQLLRLKKYNVPQLEIVPNLAEEQLHSMKEGIHAQQKEPMIGVNQELAYFYPQLFRQFYQLDAYPSGAWYYVPLGTQYPDAPSFSDIPNPIGSENSGKTTMPLW

SEQ ID NO: 102 - protein, 154 aa, Camelus dromedaries
DTERKESGSSSSEEVVSSTTEQKDILKEDMPSQRYLEELHRLNKYKLLQLEAIRDQKLIPRVKLSSHPYLEQLYRINEDNHPQLGEPVKVVTQEQAYFHLEPFPQFFQLGASPYVAWYYPPQVMQYIAHPSSYDTPEGIASEDGGKTDVMPQWW

SEQ ID NO: 103 - protein, 207 aa, Camelus bactrianus
RPKYPLRYPEVFQNEPDSIEEVLNKRKILELAVVSPIQFRQENIDELKDTRNEPTEDHIMEDTERKESGSSSSEEVVSSTTEQKDILKEDMPSQRYLEELHRLNKYKLLQLEAIRDQKLIPRVKLSSHPYLEQLYRINEDNHPQLGEPVKVVTQPFPQFFQLGASPYVAWYYPPQVMQYIAHPSSYDTPEGIASEDGGKTDVMPQWW

SEQ ID NO: 104 - protein, 199 aa, Bos mutus
RPKHPIKHQGLPQEVLNENLLRFFVAPFPEVFGKEKVNELSKDIGSESTEDQAMEDIKQMEAESISSSEEIVPNSVEQKHIQKEDVPSEHYLGYLEQLLRLKKYKVPQLEIVPNSAEERLHSMKEGIHAQQKEPMIGVNQELAYFYPELFRQFYQLDAYPSGAWYYVPLGTQYTDAPSFSDIPNPIGSENSGKTTMPLW

SEQ ID NO: 105 - protein, 226 aa, Equus caballus
REKEELNVSSETVESLSSNEPDSSSEESITHINKEKLQKFKHEGQQQREVERQDKISRFVQPQPVVYPYAEPVPYAVVPQSILPLAQPPILPFLQPEIMEVSQAKETILPKRKVMPFLKSPIVPFSERQILNPTNGENLRLPVHLIQPFMHQVPQSLLQTLMLPSQPVLSPPQSKVAPFPQPVVPYPQRDTPVQAFLLYQDPRLGPTGELDPATQPIVAVHNPVIV

SEQ ID NO: 106 - protein, 202 aa, Equus asinus
RPKLPHRHPEIIQNEQDSREKVLKERKFPSFALHTPREEYINELNRQRELLKEKQKDEHKEYLIEDPEQQESSSTSSSEEVVPINTEQKRIPREDMLYQHTLEQLRRLSKYNQLQLQAIYAQEQLIRMKENSQRKPMRVVNQEQAYFYLEPFQPSYQLDVYPYAAWFHPAQIMQHVAYSPFHDTAKLIASENSEKTDIIPEW

SEQ ID NO: 107 - protein, 199 aa, Bos indicus
  VARIANT 84: note = X can be any naturally occurring amino acid
RPKHPIKHQGLPQEVLNENLLRFFVAPFPEVFGKEKVNELSKDIGSESTEDQAMEDIKQMEAESISSSEEIVPNSVEQKHIQKXDVPSERYLGYLEQLLRLKKYKVPQLEIVPNSAEERLHSMKEGIHAQQKEPMIGVNQELAYFYPELFRQFYQLDAYPSGAWYYVPLGTQYTDAPSFSDIPNPIGSENSGKTTMPLW

SEQ ID NO: 108 - protein, 215 aa, Lama glama
RPKYPLRYPEVFQNEPDSIQEVLNKRKILELAVVSPIQFRQENIDELKDTRNEPTEDHIMEDTERTVSGSSSSEEVVSSTTEQKDILKEDMPSQRILEELHRLNKYKLLQLEAIRDQKLIPRVKLSSHPYLEQLYRINEDNHPQLGEPVKVVTQEQAYFHLEPFQQFFQLGASPYVAWYYPPQVMQYIAHPSSHDTPEGIASEDGGKTDVMPQWW

SEQ ID NO: 109 - protein, 170 aa, Homo sapiens
RPKLPLRYPERLQNPSESSEPIPLESREEYMNGMNRQRNILREKQTDEIKDTRNESTQNCVVAEPEKMESSISSSSEEMSLSKCAEQFCRLNEYNQLQLQAAHAQEQIRRMNENSHVQVPFQQLNQLAAYPYAVWYYPQIMQYVPFPPFSDISNPTAHENYEKNNVMLQW

SEQ ID NO: 110 - protein, 208 aa, Capra hircus
KHKMEHVSSSEEPINIFQEIYKQEKNMAIHPRKEKLCTTSCEEVVRNANEEEYSIRSSSEESAEVAPEEIKITVDDKHYQKALNEINQFYQKFPQYLQYPYQGPIVLNPWDQVKRNAGPFTPTVNREQLSTSEENSKKTIDMESTEVFTKKTKLTEEEKNRLNFLKKISQYYQKFAWPQYLKTVDQHQKAMKPWTQPKTNAIPYVRYL

SEQ ID NO: 111 - protein, 208 aa, Ovis aries
KHKMEHVSSSEEPINISQEIYKQEKNMAIHPRKEKLCTTSCEEVVRNADEEEYSIRSSSEESAEVAPEEVKITVDDKHYQKALNEINQFYQKFPQYLQYLYQGPIVLNPWDQVKRNAGPFTPTVNREQLSTSEENSKKTIDMESTEVFTKKTKLTEEEKNRLNFLKKISQYYQKFAWPQYLKTVDQHQKAMKPWTQPKTNAIPYVRYL

SEQ ID NO: 112 - protein, 207 aa, Bubalus bubalis
KHTMEHVSSSEESIISQETYKQEKNMAIHPSKENLCSTFCKEVIRNANEEEYSIGSSSEESAEVATEEVKITVDDKHYQKALNEINQFYQKFPQYLQYLYQGPIVLNPWDQVKRNAVPITPTLNREQLSTSEENSKKTVDMESTEVITKKTKLTEEDKNRLNFLKKISQHYQKFTWPQYLKTVYQYQKAMKPWTQPKTNVIPYVRYL

SEQ ID NO: 113 - protein, 178 aa, Camelus dromedaries
KHEMDQGSSSEESINVSQQKFKQVKKVAIHPSKEDICSTFCEEAVRNIKEVESAEVPTENKISQFYQKWKFLQYLQALHQGQIVMNPWDQGKTRAYPFIPTVNTEQLSISEESTEVPTEESTEVFTKKTELTEEEKDHQKFLNKIYQYYQTFLWPEYLKTVYQYQKTMTPWNHIKRYF

SEQ ID NO: 114 - protein, 178 aa, Camelus bactrianus
KHEMDQGSSSEESINVSQQKFKQVKKVAIHPSKEDICSTFCEEAVRNIKEVESAEVPTENKISQFYQKWKFLQYLQALHQGQIVMNPWDQGKTRAYPFIPTVNTEQLSISEESTEVPTEESTEVFNKKTELTEEEKDHQKFLNKIYQYYQTFLWPEYLKTVYQYQKTMTPWNHIKRYF

SEQ ID NO: 115 - protein, 204 aa, Bos mutus
KNTMEHVSSSEESIISQETYKQEKNMAINPSKGNLCSTFCKEVVRNANEEEYSIGSSSEESAEVATEEVKITVDDKHYQKALNEINQFYQKFPQYLQYLYQGPIVLNPWDQVKRNAVPITPTLNREQLSTSEENSKKTVDMESTEVFTKKTKLTEEEKNRLNFLKKISQRYQKFALPQYLKTVYQHQKAMKPWIQPKTKVIPYV

SEQ ID NO: 116 - protein, 216 aa, Equus caballus
KHNMEHRSSSEDSVNISQEKFKQEKYVVIPTSKESICSTSCEEATRNINEMESAKFPTEVYSSSSSSEESAKFPTEREEKEVEEKHHLKQLNKINQFYEKLNFLQYLQALRQPRIVLTPWDQTKTGDSPFIPIVNTEQLFTSEEIPKKTVDMESTEVVTEKTELTEEEKNYLKLLYYEKFTLPQYFKIVRQHQTTMDPRSHRKTNSYQIIPVLRYF

SEQ ID NO: 117 - protein, 221 aa, Equus asinus
KHNMEHRSSSEDSVNISQEKFKQEKYVVIPTSKESICSTSCEEATRNINEMESAKFPTEVYSSSSSSEESAKFPTEREEKEVEEKHHLKQLNKINQFYEKLNFLQYLQALRQPRIVLTPWDQTKTGASPFIPIVNTEQLFTSEEIPKKTVDMESTEVVTEKTELTEEEKNYLKLLNKINQYYEKFTLPQYFKIVHQHQTTMDPQSHSKTNSYQIIPVLRYF

SEQ ID NO: 118 - protein, 192 aa, Vicugna pacos
KHEMDQGSSSEESINVSQQKLKQVKKVAIHPSKEDICSTFCEEAVRNIKEVESVEVPTENKISQFYQKWKFLQYLQALHQGQIVMNPWDQGKTMVYPFIPTVNTEQLSISEESTEVPTEESTEVFTKKTELTEEEKDHQKFLNKIYQYYQTFLWPEYLKTVYQYQKTMTPWNHIKVKAYQIIPNLVSSTFYL

SEQ ID NO: 119 - protein, 207 aa, Bos indicus; identical to SEQ ID NO: 84

SEQ ID NO: 120 - protein, 187 aa, Lama glama
KHEMDQGSSSEESINVSQQKLKQVKKVAIHPSKEDICSTFCEEAVRNIKEVESVEVPTENKISQFYQKWKFLQYLQALHQGQIVMNPWDQGKTMVYPFIPTVNTEQLSISEESTEVPTEENSKKTVDTESTEVFTKKTELTEEEKDHQKFLNKIYQYYQTFLWPEYLKTVYQYQKTMTPWNHIKRYF

SEQ ID NO: 121 - protein, 207 aa, Capra hircus
REQEELNVVGETVESLSSSEESITHINKKIEKFQSEEQQQTEDELQDKIHPFAQAQSLVYPFTGPIPNSLPQNILPLTQTPVVVPPFLQPEIMGVPKVKETMVPKHKEMPFPKYPVEPFTESQSLTLTDVEKLHLPLPLVQSWMHQPPQPLSPTVMFPPQSVLSLSQPKVLPVPQKAVPQRDMPIQAFLLYQEPVLGPVRGPFPILV

SEQ ID NO: 122 - protein, 207 aa, Ovis aries
REQEELNVVGETVESLSSSEESITHINKKIEKFQSEEQQQTEDELQDKIHPFAQAQSLVYPFTGPIPNSLPQNILPLTQTPVVVPPFLQPEIMGVPKVKETMVPKHKEMPFPKYPVEPFTESQSLTLTDVEKLHLPLPLVQSWMHQPPQPLPPTVMFPPQSVLSLSQPKVLPVPQKAVPQRDMPIQAFLLYQEPVLGPVRGPFPILV

SEQ ID NO: 123 - protein, 209 aa, Bubalus bubalis
RELEELNVPGEIVESLSSSEESITHINKKIEKFQSEEQQQMEDELQDKIHPFAQTQSLVYPFPGPIPKSLPQNIPPLTQTPVVVPPFLQPEIMGVSKVKEAMAPKHKEMPFPKYPVEPFTESQSLTLTDVENLHLPLPLLQSWMHQPPQPLPPTVMFPPQSVLSLSQSKVLPVPQKAVPYPQRDMPIQAFLLYQEPVLGPVRGPFPIIV

SEQ ID NO: 124 - protein, 217 aa, Camelus dromedaries
REKEEFKTAGEALESISSSEESITHINKQKIEKFKIEEQQQTEDEQQDKIYTFPQPQSLVYSHTEPIPYPILPQNFLPPLQPAVMVPFLQPKVMDVPKTKETIIPKRKEMPLLQSPVVPFTESQSLTLTDLENLHLPLPLLQSLMYQIPQPVPQTPMIPPQSLLSLSQFKVLPVPQQMVPYPQRAMPVQAVLPFQEPVPDPVRGLHPVPQPLVPVIA

SEQ ID NO: 125 - protein, 217 aa, Camelus bactrianus
REKEEFKTAGEALESISSSEESITHINKQKIEKFKIEEQQQTEDEQQDKIYTFPQPQSLVYSHTEPIPYPILPQNFLPPLQPAVMVPFLQPKVMDVPKTKETIIPKRKEMPLLQSPVVPFTESQSLTLTDLENLHLPLPLLQSLMYQIPQPVPQTPMIPPQSLLSLSQFKVLPVPQQMVPYPQRAIPVQAVLPFQEPVPDPVRGLHPVPQPLVPVIA

SEQ ID NO: 126 - protein, 209 aa, Bos mutus; identical to SEQ ID NO: 6

SEQ ID NO: 127 - protein, 226 aa, Equus caballus; identical to SEQ ID NO: 105

SEQ ID NO: 128 - protein, 226 aa, Equus asinus
REKEELNVSSETVESLSSNEPDSSSEESITHINKEKSQKFKHEGQQQREVEHQDKISRFVQPQPVVYPYAEPVPYAVVPQNILVLAQPPIVPFLQPEIMEVSQAKETILPKRKVMPFLKSPIVPFSERQILNPTNGENLRLPVHLIQPFMHQVPQSLLQTLMLPSQPVLSPPQSKVAPFPQPVVPYPQRDTPVQAFLLYQDPQLGLTGEFDPATQPIVPVHNPVIV

SEQ ID NO: 129 - protein, 141 aa, Alces alces
  VARIANT 6: note = X can be any naturally occurring amino acid
  VARIANT 17: note = X can be any naturally occurring amino acid
  VARIANT 65: note = X can be any naturally occurring amino acid
IHPFAXTQSLVYPFTGXIPYSLPQNFLPLPQTPGMVPPFLQPEIMGVSEVKETMVPKNKEMPFPXYPVEPFAEGQSLTLTDVENLHLPLPLLQSWMHQTPQPLPPTVMFPPQSVLSLSQPKVLSVPQKAVPYPQRDMPIQA

SEQ ID NO: 130 - protein, 173 aa, Vicugna pacos
DEQQDKIYTFPQPQSLVYSHTEPIPYPILPQNFLPPLQPAVMVPFLQPKVMDVPKTKEIVIPKRKEMPLLQSPLVPFTESQSLTLTDLENLHLPLPLLQSLMHQIPQPVPQTPMIPPQSLLSLSQFKVLPVPQQMVPYPQRAMPVQALLPFQEPIPDPVRGLHPVPQPLVPVI

SEQ ID NO: 131 - protein, 209 aa, Bos indicus; identical to SEQ ID NO: 6

SEQ ID NO: 132 - protein, 217 aa, Lama glama
REKEEFKTAGEAVESISSSEESITHINKQKIEKFKIEEQQQTEDEQQDKIYTFPQPQSLVYSHTEPIPYPILPQNFLPPLQPAVMVPFLQPKVMDVPKTKEIVIPKRKEMPLLQSPLVPFTESQSLTLTDLENLHLPLPLLQSLMHQIPQPVPQTPMIPPQSLLSLSQFKVLPVPQQMVPYPQRAMPVQALLPFQEPIPDPVRGLHPVPQPLVPVIA

SEQ ID NO: 133 - protein, 211 aa, Homo sapiens
RETIESLSSSEESITEYKQKVEKVKHEDQQQGEDEHQDKIYPSFQPQPLIYPFVEPIPYGFLPQNILPLAQPAVVLPVPQPEIMEVPKAKDTVYTKGRVMPVLKSPTIPFFDPQIPKLTDLENLHLPLPLLQPLMQQVPQPIPQTLALPPQPLWSVPQPKVLPIPQQVVPYPQRAVPVQALLLNQELLLNPTHQIYPVTQPLAPVHNPISV

SEQ ID NO: 134 - DNA, 1059 bp, synthetic construct
  misc_feature 1..1059: note = Nucleic acid encoding fusion protein sig2:OKC1-T:FM:OLG1
  source 1..1059: mol_type = other DNA
atggccaagctagttttttccctttgttttctgcttttcagtggctgctgcttcgctcaagagcagaatcaagagcagccaatccgttgtgagaaggacgagaggttcttctcagacaagatcgccaaatatatacccatacaatatgtactctcacgctaccctagctacgggcttaactactatcagcaaaaacctgtagcactgataaataaccagtttctcccctatccctattatgctaaacctgccgccgtgaggagtccagcacaaatacttcagtggcaagtgctcagtaacaccgtgccagcaaaaagctgccaggctcagcccaccacaatggcccgtcatccccatcctcaccttagcttcatggcaatcccaccaaagaagaatcaagacaagaccgaaatacctaccatcaacacaattgcatctggagagcctaccagtacaccaacaactgaggcagtagagtctactgttgctacccttgaggacagccccgaggttatagagtccccacctgagataaataccgtgcaggtgacaagtaccgccgtattcatgttgatcgtaacacagactatgaagggtcttgatatacagaaggtggccgggacttggtacagtttggcaatggccgcatccgacatctccttgttggacgcacaatcagccccattgcgtgtgtacgtagaagagcttaaaccaactcccgagggggatctggaaattctgctccagaaatgggagaacggtgagtgcgcccagaagaagatcatcgcagagaagaccaaaattccagcagtattcaaaatcgacgcattgaacgaaaataaggtgctcgtactggacactgattataagaagtatctccttttctgtatggagaactcagcagagcctgaacagagtcttgcctgccaatgccttgttcgtaccccagaggtagatgatgaagctctggaaaagttcgataaggcccttaaggctctgcctatgcacattaggctttctttcaatccaactcaacttgaggaacaatgtcacatttaa

SEQ ID NO: 135 - protein, 352 aa, synthetic construct
  REGION 1..352: note = Fusion protein sig2:OKC1-T:FM:OLG1
MAKLVFSLCFLLFSGCCFAQEQNQEQPIRCEKDERFFSDKIAKYIPIQYVLSRYPSYGLNYYQQKPVALINNQFLPYPYYAKPAAVRSPAQILQWQVLSNTVPAKSCQAQPTTMARHPHPHLSFMAIPPKKNQDKTEIPTINTIASGEPTSTPTTEAVESTVATLEDSPEVIESPPEINTVQVTSTAVFMLIVTQTMKGLDIQKVAGTWYSLAMAASDISLLDAQSAPLRVYVEELKPTPEGDLEILLQKWENGECAQKKIIAEKTKIPAVFKIDALNENKVLVLDTDYKKYLLFCMENSAEPEQSLACQCLVRTPEVDDEALEKFDKALKALPMHIRLSFNPTQLEEQCHI

SEQ ID NO: 136 - DNA, 1071 bp, synthetic construct
  misc_feature 1..1071: note = Nucleic acid encoding fusion protein sig2:OKC1-T:FM:OLG1:KDEL
  source 1..1071: mol_type = other DNA
atggccaagctagttttttccctttgttttctgcttttcagtggctgctgcttcgctcaagagcagaatcaagagcagccaatccgttgtgagaaggacgagaggttcttctcagacaagatcgccaaatatatacccatacaatatgtactctcacgctaccctagctacgggcttaactactatcagcaaaaacctgtagcactgataaataaccagtttctcccctatccctattatgctaaacctgccgccgtgaggagtccagcacaaatacttcagtggcaagtgctcagtaacaccgtgccagcaaaaagctgccaggctcagcccaccacaatggcccgtcatccccatcctcaccttagcttcatggcaatcccaccaaagaagaatcaagacaagaccgaaatacctaccatcaacacaattgcatctggagagcctaccagtacaccaacaactgaggcagtagagtctactgttgctacccttgaggacagccccgaggttatagagtccccacctgagataaataccgtgcaggtgacaagtaccgccgtattcatgttgatcgtaacacagactatgaagggtcttgatatacagaaggtggccgggacttggtacagtttggcaatggccgcatccgacatctccttgttggacgcacaatcagccccattgcgtgtgtacgtagaagagcttaaaccaactcccgagggggatctggaaattctgctccagaaatgggagaacggtgagtgcgcccagaagaagatcatcgcagagaagaccaaaattccagcagtattcaaaatcgacgcattgaacgaaaataaggtgctcgtactggacactgattataagaagtatctccttttctgtatggagaactcagcagagcctgaacagagtcttgcctgccaatgccttgttcgtaccccagaggtagatgatgaagctctggaaaagttcgataaggcccttaaggctctgcctatgcacattaggctttctttcaatccaactcaacttgaggaacaatgtcacattaaggatgagctttaa

SEQ ID NO: 137 - protein, 356 aa, synthetic construct
  REGION 1..356: note = Fusion protein sig2:OKC1-T:FM:OLG1:KDEL
MAKLVFSLCFLLFSGCCFAQEQNQEQPIRCEKDERFFSDKIAKYIPIQYVLSRYPSYGLNYYQQKPVALINNQFLPYPYYAKPAAVRSPAQILQWQVLSNTVPAKSCQAQPTTMARHPHPHLSFMAIPPKKNQDKTEIPTINTIASGEPTSTPTTEAVESTVATLEDSPEVIESPPEINTVQVTSTAVFMLIVTQTMKGLDIQKVAGTWYSLAMAASDISLLDAQSAPLRVYVEELKPTPEGDLEILLQKWENGECAQKKIIAEKTKIPAVFKIDALNENKVLVLDTDYKKYLLFCMENSAEPEQSLACQCLVRTPEVDDEALEKFDKALKALPMHIRLSFNPTQLEEQCHIKDEL

SEQ ID NO: 138 - DNA, 1647 bp, synthetic construct
  misc_feature 1..1647: note = EU:Rb7 dual terminator
  source 1..1647: mol_type = other DNA
aaagcagaatgctgagctaaaagaaaggctttttccattttcgagagacaatgagaaaagaagaagaagaagaagaagaagaagaagaagaaaagagtaaataataaagccccacaggaggcgaagttcttgtagctccatgttatctaagttattgatattgtttgccctatattttatttctgtcattgtgtatgttttgttcagtttcgatctccttgcaaaatgcagagattatgagatgaataaactaagttatattattatacgtgttaatattctcctcctctctctagctagccttttgttttctctttttcttatttgattttctttaaatcaatccattttaggagagggccagggagtgatccagcaaaacatgaagattagaagaaacttccctcttttttttcctgaaaacaatttaacgtcgagatttatctctttttgtaatggaatcatttctacagttatgactcgattaaaatcccaattatatttggtctaatttagtttggtattgagtaaaacaaattcgaaccaaaccaaaatataaatatatagtttttatatatatgcctttaagactttttatagaattttctttaaaaaatatctagaaatatttgcgactcttctggcatgtaatatttcgttaaatatgaagtgctccatttttattaactttaaataattggttgtacgatcactttcttatcaagtgttactaaaatgcgtcaatctctttgttcttccatattcatatgtcaaaatctatcaaaattcttatatatctttttcgaatttgaagtgaaatttcgataatttaaaattaaatagaacatatcattatttaggtatcatattgatttttatacttaattactaaatttggttaactttgaaagtgtacatcaacgaaaaattagtcaaacgactaaaataaataaatatcatgtgttattaagaaaattctcctataagaatattttaatagatcatatgtttgtaaaaaaaattaatttttactaacacatatatttacttatcaaaaatttgacaaagtaagattaaaataatattcatctaacaaaaaaaaaaccagaaaatgctgaaaacccggcaaaaccgaaccaatccaaaccgatatagttggtttggtttgattttgatataaaccgaaccaactcggtccatttgcacccctaatcataatagctttaatatttcaagatattattaagttaacgttgtcaatatcctggaaattttgcaaaatgaatcaagcctatatggctgtaatatgaatttaaaagcagctcgatgtggtggtaatatgtaatttacttgattctaaaaaaatatcccaagtattaataatttctgctaggaagaaggttagctacgatttacagcaaagccagaatacaaagaaccataaagtgattgaagctcgaaatatacgaaggaacaaatatttttaaaaaaatacgcaatgacttggaacaaaagaaagtgatatattttttgttcttaaacaagcatcccctctaaagaatggcagttttcctttgcatgtaactattatgctcccttcgttacaaaaattttggactactattgggaacttcttctgaaaatagt

SEQ ID NO: 139 - DNA, 480 bp, Nicotiana tabacum
  source 1..480: mol_type = other DNA
aaagcagaatgctgagctaaaagaaaggctttttccattttcgagagacaatgagaaaagaagaagaagaagaagaagaagaagaagaagaaaagagtaaataataaagccccacaggaggcgaagttcttgtagctccatgttatctaagttattgatattgtttgccctatattttatttctgtcattgtgtatgttttgttcagtttcgatctccttgcaaaatgcagagattatgagatgaataaactaagttatattattatacgtgttaatattctcctcctctctctagctagccttttgttttctctttttcttatttgattttctttaaatcaatccattttaggagagggccagggagtgatccagcaaaacatgaagattagaagaaacttccctcttttttttcctgaaaacaatttaacgtcgagatttatctctttttgtaatggaatcatttctacagttatgac

SEQ ID NO: 140 - DNA, 1167 bp, Nicotiana tabacum
  source 1..1167: mol_type = other DNA
tcgattaaaatcccaattatatttggtctaatttagtttggtattgagtaaaacaaattcgaaccaaaccaaaatataaatatatagtttttatatatatgcctttaagactttttatagaattttctttaaaaaatatctagaaatatttgcgactcttctggcatgtaatatttcgttaaatatgaagtgctccatttttattaactttaaataattggttgtacgatcactttcttatcaagtgttactaaaatgcgtcaatctctttgttcttccatattcatatgtcaaaatctatcaaaattcttatatatctttttcgaatttgaagtgaaatttcgataatttaaaattaaatagaacatatcattatttaggtatcatattgatttttatacttaattactaaatttggttaactttgaaagtgtacatcaacgaaaaattagtcaaacgactaaaataaataaatatcatgtgttattaagaaaattctcctataagaatattttaatagatcatatgtttgtaaaaaaaattaatttttactaacacatatatttacttatcaaaaatttgacaaagtaagattaaaataatattcatctaacaaaaaaaaaaccagaaaatgctgaaaacccggcaaaaccgaaccaatccaaaccgatatagttggtttggtttgattttgatataaaccgaaccaactcggtccatttgcacccctaatcataatagctttaatatttcaagatattattaagttaacgttgtcaatatcctggaaattttgcaaaatgaatcaagcctatatggctgtaatatgaatttaaaagcagctcgatgtggtggtaatatgtaatttacttgattctaaaaaaatatcccaagtattaataatttctgctaggaagaaggttagctacgatttacagcaaagccagaatacaaagaaccataaagtgattgaagctcgaaatatacgaaggaacaaatatttttaaaaaaatacgcaatgacttggaacaaaagaaagtgatatattttttgttcttaaacaagcatcccctctaaagaatggcagttttcctttgcatgtaactattatgctcccttcgttacaaaaattttggactactattgggaacttcttctgaaaatagt

SEQ ID NO: 141 - DNA, 625 bp, synthetic construct
  misc_feature 1..625: note = AtHSP:AtUbi10 Dual Terminator
  source 1..625: mol_type = other DNA
atatgaagatgaagatgaaatatttggtgtgtcaaataaaaagcttgtgtgcttaagtttgtgtttttttcttggcttgttgtgttatgaatttgtggctttttctaatatcaaatgaatgtaagatctcattataatgaataaacaaatgtttctataatccattgtgaatgttttgttggatctcttctgcagcatataactactgtatgtgctatggtatggactatggaatatgattaaagataaatctcgtctctgttatgcttaagaagttcaatgtttcgtttcatgtaaaactttggtggtttgtgttttggggccttgtataatccctgatgaataagtgttctactatgtttccgttcctgttatctctttctttctaatgacaagtcgaacttcttctttatcatcgcttcgtttttattatctgtgcttcttttgtttaatacgcctgcaaagtgactcgactctgtttagtgcagttctgcgaaacttgtaaatagtccaattgttggcctctagtaatagatgtagcgaaagtgttgagctgttgggttctaaggatggcttgaacatgttaatcttttaggttctgagtatgatgaacattcgttgttgc

SEQ ID NO: 142 - DNA, 249 bp, Arabidopsis thaliana
  source 1..249: mol_type = other DNA
atatgaagatgaagatgaaatatttggtgtgtcaaataaaaagcttgtgtgcttaagtttgtgtttttttcttggcttgttgtgttatgaatttgtggctttttctaatatcaaatgaatgtaagatctcattataatgaataaacaaatgtttctataatccattgtgaatgttttgttggatctcttctgcagcatataactactgtatgtgctatggtatggactatggaatatgattaaagataa

SEQ ID NO: 143 - DNA, 376 bp, Arabidopsis thaliana
  source 1..376: mol_type = other DNA
atctcgtctctgttatgcttaagaagttcaatgtttcgtttcatgtaaaactttggtggtttgtgttttggggccttgtataatccctgatgaataagtgttctactatgtttccgttcctgttatctctttctttctaatgacaagtcgaacttcttctttatcatcgcttcgtttttattatctgtgcttcttttgtttaatacgcctgcaaagtgactcgactctgtttagtgcagttctgcgaaacttgtaaatagtccaattgttggcctctagtaatagatgtagcgaaagtgttgagctgttgggttctaaggatggcttgaacatgttaatcttttaggttctgagtatgatgaacattcgttgttgc

SEQ ID NO: 144 - DNA, 894 bp, synthetic construct
  misc_feature 1..894: note = EU:StUbi3 Dual Terminator
  source 1..894: mol_type = other DNA
aaagcagaatgctgagctaaaagaaaggctttttccattttcgagagacaatgagaaaagaagaagaagaagaagaagaagaagaagaagaaaagagtaaataataaagccccacaggaggcgaagttcttgtagctccatgttatctaagttattgatattgtttgccctatattttatttctgtcattgtgtatgttttgttcagtttcgatctccttgcaaaatgcagagattatgagatgaataaactaagttatattattatacgtgttaatattctcctcctctctctagctagccttttgttttctctttttcttatttgattttctttaaatcaatccattttaggagagggccagggagtgatccagcaaaacatgaagattagaagaaacttccctcttttttttcctgaaaacaatttaacgtcgagatttatctctttttgtaatggaatcatttctacagttatgacctgattttaatgtttagcaaatgtcttatcagttttctctttttgtcgaacggtaatttagagttttttttgctatatggattttcgtttttgatgtatgtgacaaccctcgggattgttgatttatttcaaaactaagagtttttgtcttattgttctcgtctattttggaatatcaatcttagttttatatcttttctagttctctacgtgttaaatgttcaacacactagcaatttggcctgccagcgtatggattatggaactatcaagtgtgtgggatcgataaatatgcttctcaggaatttgagattttacagtctttatgctcattgggttgagtataatatagtaaaaaaatagtaaatttaagcaataatgttaggtgctatgtgtctgtcgagactattggcc

SEQ ID NO: 145 - DNA, 414 bp, Solanum tuberosum
  source 1..414: mol_type = other DNA
ctgattttaatgtttagcaaatgtcttatcagttttctctttttgtcgaacggtaatttagagttttttttgctatatggattttcgtttttgatgtatgtgacaaccctcgggattgttgatttatttcaaaactaagagtttttgtcttattgttctcgtctattttggaatatcaatcttagttttatatcttttctagttctctacgtgttaaatgttcaacacactagcaatttggcctgccagcgtatggattatggaactatcaagtgtgtgggatcgataaatatgcttctcaggaatttgagattttacagtctttatgctcattgggttgagtataatatagtaaaaaaatagtaaatttaagcaataatgttaggtgctatgtgtctgtcgagactattggcc

SEQ ID NO: 146 - DNA, 1670 bp, synthetic construct
  misc_feature 1..1670: note = EU:TM6 Dual Terminator
  source 1..1670: mol_type = other DNA
aaagcagaatgctgagctaaaagaaaggctttttccattttcgagagacaatgagaaaagaagaagaagaagaagaagaagaagaagaagaaaagagtaaataataaagccccacaggaggcgaagttcttgtagctccatgttatctaagttattgatattgtttgccctatattttatttctgtcattgtgtatgttttgttcagtttcgatctccttgcaaaatgcagagattatgagatgaataaactaagttatattattatacgtgttaatattctcctcctctctctagctagccttttgttttctctttttcttatttgattttctttaaatcaatccattttaggagagggccagggagtgatccagcaaaacatgaagattagaagaaacttccctcttttttttcctgaaaacaatttaacgtcgagatttatctctttttgtaatggaatcatttctacagttatgacgacatcctaggttcaatcaaattttactcgcatattgtagactttatccttttgtaattgttgcaaatttcttataaaattgattatctatattttaatcaaacatatatatacacttccaaataataaaatataatgacaacaaaacaatcaagcacaaaaaatgcctataacaaataaaaattacaacatacttttaccctgattcaaatcttcaaacactatgccagacaccataatccttctggatataggataaaaatttaaagtgattttttaccaattactatttcataaattgttcaaatacaaaatatgatattttaattattcccaactttttgagcctcctataactaatcaatataaaaaaataatttatcgattaagactaaagcaaaaaatattaccgatttgagttacaataaaaagttttatatcacgttatggtattgtgaattactctaacttcctagttcttgggttctagcttttcttggctctctgaatcttcaaaacctatatttgataaagccataacatacactaatgctcccatgcaaagtgcttctaaaactccttaacttggtctacggtaaaatttcttctaaaacaaaagcgactatcaacttctaatcgttgaacaaataattcatctccaataaaggattttaacaataaatatgaaataagaagtctatttctagttaaataaccaacaatatcccaaacatttatgaaatcaatatatgactgcattacaatttgatcccaaaatgcaaaaataaaattgcatctctattatagagtaaaaataatgcatcatcaattactaaccgattttactaacacgagaatctaattctcttccacaaagtaaaactcaatgtcaccgtcaattatttaagaatttgaattatattccaacaactgagtaagaaactatataattgtggggggagggggggccaaccctaaaagtttacttctcataaaaggctattagaaaggaaaggatacataaaaagaagagcaaagagagatcggagaagagagaaaaagtatatgaatttattagaagtacttttacttattagaggtaagagagttctagactgatttggataccatattagagttattaccgatataaaaatccttggttatgttaattaaatttctaaatatta

SEQ ID NO: 147 - DNA, 1190 bp, Nicotiana tabacum
  source 1..1190: mol_type = other DNA
gacatcctaggttcaatcaaattttactcgcatattgtagactttatccttttgtaattgttgcaaatttcttataaaattgattatctatattttaatcaaacatatatatacacttccaaataataaaatataatgacaacaaaacaatcaagcacaaaaaatgcctataacaaataaaaattacaacatacttttaccctgattcaaatcttcaaacactatgccagacaccataatccttctggatataggataaaaatttaaagtgattttttaccaattactatttcataaattgttcaaatacaaaatatgatattttaattattcccaactttttgagcctcctataactaatcaatataaaaaaataatttatcgattaagactaaagcaaaaaatattaccgatttgagttacaataaaaagttttatatcacgttatggtattgtgaattactctaacttcctagttcttgggttctagcttttcttggctctctgaatcttcaaaacctatatttgataaagccataacatacactaatgctcccatgcaaagtgcttctaaaactccttaacttggtctacggtaaaatttcttctaaaacaaaagcgactatcaacttctaatcgttgaacaaataattcatctccaataaaggattttaacaataaatatgaaataagaagtctatttctagttaaataaccaacaatatcccaaacatttatgaaatcaatatatgactgcattacaatttgatcccaaaatgcaaaaataaaattgcatctctattatagagtaaaaataatgcatcatcaattactaaccgattttactaacacgagaatctaattctcttccacaaagtaaaactcaatgtcaccgtcaattatttaagaatttgaattatattccaacaactgagtaagaaactatataattgtggggggagggggggccaaccctaaaagtttacttctcataaaaggctattagaaaggaaaggatacataaaaagaagagcaaagagagatcggagaagagagaaaaagtatatgaatttattagaagtacttttacttattagaggtaagagagttctagactgatttggataccatattagagttattaccgatataaaaatccttggttatgttaattaaatttctaaatatta

SEQ ID NO: 148 - protein, 190 aa, Bos taurus
MMKSFFLVVTILALTLPFLGAQEQNQEQPIRCEKDERFFSDKIAKYIPIQYVLSRYPSYGLNYYQQKPVALINNQFLPYPYYAKPAAVRSPAQILQWQVLSNTVPAKSCQAQPTTMARHPHPHLSFMAIPPKKNQDKTEIPTINTIASGEPTSTPTTEAVESTVATLEDSPEVIESPPEINTVQVTSTAV

SEQ ID NO: 149 - protein, 190 aa, Bos taurus
MMKSFFLVVTILALTLPFLGAQEQNQEQPIRCEKDERFFSDKIAKYIPIQYVLSRYPSYGLNYYQQKPVALINNQFLPYPYYAKPAAVRSPAQILQWQVLSNTVPAKSCQAQPTTMARHPHPHLSFMAIPPKKNQDKTEIPTINTIASGEPTSTPTIEAVESTVATLEASPEVIESPPEINTVQVTSTAV

SEQ ID NO: 150 - protein, 190 aa, Bos taurus
MMKSFFLVVTILALTLPFLGAQEQNQEQPIRCEKDERFFSDKIAKYIPIQYVLSRYPSYGLNYYQQKPVALINNQFLPYPYYAKPAAVRSPAQILQWQVLSNTVPAKSCQAQPTTMARHPHPHLSFMAIPPKKNQDKTEIPTINTIASGEPTSTPTIEAVESTVATLEASPEVTESPPEINTVQVTSTAV

SEQ ID NO: 151 - protein, 169 aa, Bos taurus
QEQNQEQPIRCEKDERFFSDKIAKYIPIQYVLSRYPSYGLNYYQQKPVALINNQFLPYPYYAKPAAVRSPAQILQWQVLSNTVPAKSCQAQPTTMAHHPHPHLSFMAIPPKKNQDKTEIPTINTIASGEPTSTPITEAVESTVATLEASPEVIESPPEINTVQVTSTAV

SEQ ID NO: 152 - protein, 190 aa, Bos taurus
MMKSFFLVVTILALTLPFLGAQEQNQEQPIRCEKDERFFSDKIAKYIPIQYVLSRYPSYGLNYYQQKPVALINNQFLPYPYYAKPAAVRSPAQILQWQVLSNTVPAKSCQAQPTTMARHPHPHLSFMAIPPKKNQDKTGIPTINTIASGEPTSTPTIEAVESTVATLEASPEVTESPPEINTVQVTSTAV

SEQ ID NO: 153 - protein, 160 aa, Bos taurus
RCEKDERFFSDKIAKYIPIQYVLSRYPSYGLNYYQQKPVALINNQFLPYPYYAKPAAVRSPAQILQWQVLSNTVPAKSCQAQPTTMARHPHPHLSFMAIPPKKNQDKTEIPTINTIASGEPTSTPITEAVESTVATLEDSPEVIESPPEINTVQVTSTAV

SEQ ID NO: 154 - protein, 160 aa, Bos taurus
HCEKDERFFSDKIAKYIPIQYVLSRYPSYGLNYYQQKPVALINNQFLPYPYYAKPAAVRSPAQILQWQVLSNTVPAKSCQAQPTTMARHPHPHLSFMAIPPKKNQDKTEIPTINTIASGEPTSTPTTEAVESTVATLEDSPEVIESPPEINTVQVTSTAV

SEQ ID NO: 155 - protein, 179 aa, Bos taurus
MMKSFFLVVTILALTLPFLRCEKDERFFSDKIAKYIPIQYVLSRYPSYGLNYYQQKPVALINNQFLPYPYYAKPAAVRSPAQILQWQVLSNTVPAKSCQAQPTTMARHPHPHLSFMAIPPKKNQDKTEIPTINTIASGEPTSTPTIEAVESTVATLEASPEVIESPPEINTVQVTSTAV

SEQ ID NO: 156 - protein, 159 aa, Bos taurus
CEKDERFFSDKIAKYIPIQYVLSRYPSYGLNYYQQKPVALINNQFLPYPYYAKPAAVRSPAQILQWQVLSNTVPAKSCQAQPTTMAHHPHPHLSFMAIPPKKNQDKTEIPTINTIASGEPTSTPTTEAVESTVATLEDSPEVIESPPEINTVQVTSTAV

SEQ ID NO: 157 - protein, 160 aa, Bos taurus
RCEKDERFFSDKIAKYIPIQYVLSRYPSYGLNYYQQKPVALINNQFLPYPYYAKPAAVRSPAQILQWQVLSNTVPAKSCQAQPTTMARHPHPHLSFMAIPPKKNQDKTEIPTINTIASGEPTSTPTIEAVESTVATLEASPEVIESPPEINTVQVTSTAV

SEQ ID NO: 158 - protein, 160 aa, Bos taurus
RCEKDERFFSDKIAKYIPIQYVLSRYPSYGLNYYQQKPVALINNQFLPYPYYAKPAAVRSPAQILQWQVLSNTVPAKSCQAQPTTMACHPHPHLSFMAIPPKKNQDKTEIPTINTIASGEPTSTPITEAVESTVATLEDSPEVIESPPEINTVQVTSTAV

SEQ ID NO: 159 - protein, 145 aa, Bos taurus
YIPIQYVLSRYPSYGLNYYQQKPVALINNQFLPYPYYAKPAAVRSPAQILQWQVLSNTVPAKSCQAQPTTMARHPHPHLSFMAIPPKKNQDKTEIPTINTIASGEPTSTPTTEAVESTVATLEDSPEVIESPPEINTVQVTSTAV

SEQ ID NO: 160 - protein, 160 aa, Bos taurus
MMKSFFLVVTILALTLPFLGAQEQNQEQPIRCEKDERFFSDKIAKYIPIQYVLSRYPSYGLNYYQQKPVALINNQFLPYPYYAKPAAVRSPAQILQWQVLSNTVPAKSCQAQPTTMARHPHPHLSFMAIPPKKNQDKTEIPTINTIASGEPTSTPTTEAV

SEQ ID NO: 161 - protein, 142 aa, Bos taurus
IQYVLSRYPSYGLNYYQQKPVALINNQFLPYPYYAKPAAVRSPAQILQWQVLSNTVPAKSCQAQPTTMARHPHPHLSFMAIPPKKNQDKTEIPTINTIASGEPTSTPITEAVESTVATLEDSPEVIESPPEINTVQVTSTAV

SEQ ID NO: 162 - protein, 141 aa, Bos taurus
QYVLSRYPSYGLNYYQQKPVALINNQFLPYPYYAKPAAVRSPAQILQWQVLSNTVPAKSCQAQPTTMARHPHPHLSFMAIPPKKNQDKTEIPTINTIASGEPTSTPTTEAVESTVATLEDSPEVIEGPPEINTVQVTSTAV

SEQ ID NO: 163 - protein, 139 aa, Bos taurus
VLSRYPSYGLNYYQQKPVALINNQFLPYPYYAKPAAVRSPAQILQWQVLSNTVPAKSCQAQPTTMARHPHPHLSFMAIPPKKNQDKTEIPTINTIASGEPTSTPTTEAVESTVATLEDSPEVIESPPEINTVQVTSTAV

SEQ ID NO: 164 - protein, 140 aa, Bos taurus
YVLSRYPSYGLNYYQQKPVALINNQFLPYPYYAKPAAVRSPAQILQWQVLSNTVPAKSCQAQPTTMARHPHPHLSFMAIPPKKNQDKTEIPTINTIASGEPTSTPTIEAVESTVATLEASPEVIESPPEINTVQVTSTAV

SEQ ID NO: 165 - protein, 192 aa, Capra hircus
MMKSFFLVVTILALTLPFLGAQEQNQEQPICCEKDERFFDDKIAKYIPIQYVLSRYPSYGLNYYRQRPVALINNQFLPYPYYAKPIAVRSPAQTLQWQVLPNTVPAKSCQDQPTTLARHPHPHLSFMAIPPKKDQDKTEIPAINTIASAEPTVHSTPTTEAIVNTVDNPEASSESIASAPETNTAQVTSTEV

SEQ ID NO: 166 - protein, 192 aa, Capra hircus
MMKSFFLVVTILALTLPFLGAQEQNQEQPICCEKDERFFDDKIAKYIPIQYVLSRYPSYGLNYYQQRPVALINNQFLPYPYYAKPVAVRSPAQTLQWQVLPNTVPAKSCQDQPTTLARHPHPHLSFMAIPPKKDQDKTEIPAINTIASAEPTVHSTPTTEAIVNTVDNPEASSESIASASETNTAQVTSTEV

SEQ ID NO: 167 - protein, 162 aa, Capra hircus
CCEKDERFFDDKIAKYIPIQYVLSRYPSYGLNYYQQRPVALINNQFLPYPYYAKPVAVRSPAQTLQWQVLPNTVPAKSCQDQPTTLARHPHPHLSFMAIPPKKDQDKTEIPAINTIASAEPTVHSTPTTEAIVNTVDNPEASSESIASAPETNTAQVTSTEV

SEQ ID NO: 168 - protein, 161 aa, Capra hircus
CEKDERFFDDKIAKYIPIQYVLSRYPSYGLNYYQQRPVALINNQFLPYPYYAKPIAVRSPAQTLQWQVLPNTVPAKSCQDQPTTLARHPHPHLSFMAIPPKKDQDKTEIPAINTIASAEPTVHSTPTTEAIVNTVDNPEASSESIASAPETNTAQVTSTEV

SEQ ID NO: 169 - protein, 192 aa, Capra hircus
MMKSFFLVVTILALTLPFLGAQEQNQEQPICCEKDERFFDDKIAKYIPIQYVLSRYPSYGLNYYQQRPVALINNQFLPYPYYAKPVAVRSPAQTLQWQVLPNTVPAKSCQDQPTTLARHPHPHLSFMAIPPKKDQDKTEVPAINTIASAEPTVHSTPTTEAIVNTVDNPEASSESIASASETNTAQVTSTEV

SEQ ID NO: 170 - protein, 162 aa, Capra hircus
CCEKDERFFDDKIAKYIPIQYVLSRYPSYGLNYYQQRPVALINNQFLPYPYYAKPIAVRSPAQTLQWQVLPNTVPAKSCQDQPTTLARHPHPHLSFMAIPPKKDQDKTEIPAINTIASAEPTVHSTPTTEAIVNTVDNPEASSESIASAPETNTAQVTSTEV

SEQ ID NO: 171 - protein, 161 aa, Capra hircus
CEKDERFFDDKIAKYIPIQYVLSRYPSYGLNYYQQRPVALINNQFLPYPYYAKPIAVRSPAQTLQWQVLPNTVPAKSCQDQPTTLARHPHPHLSFMAIPPKKDQDKTEIPAINTIASAEPTVHSTPTTEAIVNTVDNPEASSESIVSAPETNTAQVTSTEV

SEQ ID NO: 172 - protein, 162 aa, Capra hircus
CCEKDERFFDDKIAKYIPIQYVLSRYPSYGLNYYQQRPVALINNQFLPYPYYAKPIAVRSPAQTLQWQVLPNTVPAKSCQDQPTTLARHPHPHLSFMAIPPKKDQDKTEIPAINTIASAEPTVHSTPTTEAIVNTVDNPEASSESIVSAPETNTAQVTSTEV

SEQ ID NO: 173 - protein, 161 aa, Capra hircus
CEKDERFFDDKIAKYIPIQYVLSRYPSYGLNYYRQRPVALINNQFLPYPYYAKPIAVRSPAQTLQWQVLPNTVPAKSCQDQPTTLARHPHPHLSFMAIPPKKDQDKTEIPAINTIASAEPTVHSTPTTEAIVNTVDNPEASSESIASAPETNTAQVTSTEV

SEQ ID NO: 174 - protein, 192 aa, Capra hircus
MMKSFFLVVTILALTLPFLGAQEQNQEQPICCEKDERFFDDKIAKYIPIQYVLSRYPSYGLNYYQQRPVALINNQFLPYPYYAKPVAVRSPAQTLQWQVLPNTVPAKSCQDQPTTLARHPHPHLSFMAIPPKKDQDKTEIPAINTIASAEPTVHSTPITEAIVNTVDNPEASSESIASASETNTAQVTSTEV

SEQ ID NO: 175 - protein, 162 aa, Capra hircus
CCEKDERFFDDKIAKYIPIQYVLSRYPSYGLNYYQQRPVALINNQFLPYPYYAKPVAVRSPAQTLQWQVLPNTVPAKSCQNQPTTLARHPHPHLSFMAIPPKKDQDKTEIPAINTIASAEPTVHSTPTTEAIVNTADNPEASSESIASAPETNTAQVTSTEV

SEQ ID NO: 176 - protein, 162 aa, Capra hircus
CCEKDERFFDDKIAKYIPIQYVLSRYPSYGLNYYRQRPVALINNQFLPYPYYAKPIAVRSPAQTLQWQVLPNTVPAKSCQDQPTTLARHPHPHLSFMAIPPKKDQDKTEIPAINTIASAEPTVHSTPTTEAIVNTVDNPEASSESIASAPETNTAQVTSTEV

SEQ ID NO: 177 - protein, 162 aa, Capra hircus
CCEKDERFFDDKIAKYIPIQYVLSRYPSYGLNYYQQRPVALINNQFLPYPYYAKPVAVRSPAQTLQWQVLPNTVPAKSCQGQPTTLARHPHPHLSFMAIPPKKDQDKTEIPAINTIASAEPTVHSTPTTEAIVNTVDNPEASSESIASASETNTAQVTSTEV

SEQ ID NO: 178 - protein, 161 aa, Capra hircus
CEKDERFFDDKIAKYIPIQYVLSRYPSYGLNYYQQRPVALINNQFLPYPYYAKPVAVRSPAQTLQWQVLPNTVPAKSCQDQPTTLARHPHPHLSFMAIPPKKDQDKTEIPAINTIASAEPTVHSTPTTEAIVNTVDNPEASSESIASASETNTAQVTSTEV

SEQ ID NO: 179 - protein, 162 aa, Capra hircus
CCEKDERFFDDKIAKYIPIQYVLSRYPSYGLNYYQQRPVALINNQFLPYPYYAKPVAVRSPAQTLQWQVLPNTVPAKSCQDQPTTLARHPHPHLSFMAIPPKKDQDKTEIPAINTIASAEPTVHSTPTTEAIVNTVDNPEASSESIASASETNTAQVTSTEV

SEQ ID NO: 180 - protein, 161 aa, Capra hircus
CEKDERFFDDKIAKYIPIQYVLSRYPSYGLNYYQQRPVALINNQFLPYPYYAKPVAVRSPAQTLQWQVLPNTVPAKSCQDQPTTLARHPHPHLSFMAIPPKKDQDKTEVPAINTIASAEPTVHSTPTTEAIVNTVDNPEASSESIASASETNTAQVTSTEV

SEQ ID NO: 181 - protein, 162 aa, Capra hircus
CCEKDERFFDDKIAKYIPIQYVLSRYPSYGLNYYQQRPVALINNQFLPYPYYAKPIAVRSPAQTLQWQVLPNTVPAKSCQDQPTTLARHPHPHLSFMAIPPKKDQDKTEIPAINTIASAEPTVHSTPTTEAIVNTVDNPEASSESIASASETNTAQVTSTEV

SEQ ID NO: 182 - protein, 162 aa, Capra hircus
CCEKDERFFDDKIAKYIPIQYVLSRYPSYGLNYYQQRPVALINNQFLPYPYYAKPVAVRSPAQTLQWQVLPNTVPAKSCQDQPTTLARHPHPHLSFMAIPPKKDQDKTEVPAINTIASAEPTVHSTPTTEAIVNTVDNPEASSESIASASETNTAQVTSTEV

SEQ ID NO: 183 - protein, 162 aa, Capra hircus
CCEKDERFFDDKIAKYIPIQYVLSRYPSYGLNYYRQRPVALINNQFLPYPYYAKPVAVRSPAQTLQWQVLPNTVPAKSCQDQPTTLARHPHPHLSFMAIPPKKDQDKTEIPAINTIASAEPTVHSTPTTEAIVNTVDNPEASSESIASASETNTAQVTSTEV

SEQ ID NO: 184 - protein, 192 aa, Ovis aries
MMKSFFLVVTILALTLPFLGAQEQNQEQRICCEKDERFFDDKIAKYIPIQYVLSRYPSYGLNYYQQRPVALINNQFLPYPYYAKPVAVRSPAQTLQWQVLPNAVPAKSCQDQPTAMARHPHPHLSFMAIPPKKDQDKTEIPAINTIASAEPTVHSTPTTEAVVNAVDNPEASSESIASAPETNTAQVTSTEV

SEQ ID NO: 185 - protein, 162 aa, Ovis aries
CCEKDERFFDDKIAKYIPIQYVLSRYPSYGLNYYQQRPVALINNQFLPYPYYAKPVAVRSPAQTLQWQVLPNAVPAKSCQDQPTAMARHPHPHLSFMAIPPKKDQDKTEIPAINTIASAEPTVHSTPTTEAVVNAVDNPEASSESIASAPETNTAQVTSTEV

SEQ ID NO: 186 - protein, 190 aa, Bubalus bubalis
MMKSFFLVVTILALTLPFLGAQEQNQEQPIRCEKEERFFNDKIAKYIPIQYVLSRYPSYGLNYYQQKPVALINNQFLPYPYYAKPAAVRSPAQILQWQVLPNTVPAKSCQAQPTTMTRHPHPHLSFMAIPPKKNQDKTEIPTINTIVSVEPTSTPTTEAIENTVATLEASSEVIESVPETNTAQVTSTVV

SEQ ID NO: 187 - protein, 190 aa, Bubalus bubalis
MMKSFFLVVTILALTLPFLGAQEQNQEQPIRCEKEERFFNDKIAKYIPIQYVLSRYPSYGLNYYQQKPVALINNQFLPYPYYAKPAAVRSPAQILQWQVLPNTVPAKSCQAQPTTMTRHPHPHLSFMAIPPKKNQDKTEIPTINTIVSIEPTSTPTTEAIENTVATLEASSEVIESVPETNTAQVTSTVV

SEQ ID NO: 188 - protein, 190 aa, Bubalus bubalis
MMKSFFLVVTILALTLPFLGAQEQNQEQPIRCEKEERFFNDKIAKYIPIQYVLSRYPSYGLNYYQQKPVALINNQFLPYPYYAKPAAVRSPAQILQWQVLPNTVPAKSCQAQPTTMTRHPHPHLSFMAIPPKKNQDKTEIPTINTIVSVEPTSTPTTEAIENTVATLEASSDVIESVPETNTAQVTSTVV

SEQ ID NO: 189 - protein, 190 aa, Bubalus bubalis
MMKSFFLVVTILALTLPFLGAQEQNQEQPIRCEKEERFFNDKIAKYIPIQYVLSRYPSYGLNYYQQKPVALINNQFLPYPYYAKPAAVRSPAQILQWQVLPNTVPAKSCQAQPTTMTRHPHPHLSFMAIPPKKNQDKTEIPTINTIVSIEPTSTPTTEAIENTVATLEASSDVIESVPETNTAQVTSTVV

SEQ ID NO: 190 - protein, 190 aa, Bubalus bubalis
MMKSFFLVVTILALTLPFLGAQEQNQEQPIRCEKEERFFNDKIAKYIPIQYVLSRYPSYGLNYYQQKPVALINNQFLPYPYYAKPAAVRSPAQILQWQVLPNTVPAKSCQAQPTTMTRHPHPHLSFMAIPPKKNQDKTEIPTINTIVSVEPTSTPITEAIENTVATLEASSEVIESVPETNTAQVTSTVV

SEQ ID NO: 191 - protein, 190 aa, Bubalus bubalis
MMKSFFLVVTILALTLPFLGAQEQNQEQLIRCEKEERFFNDKIAKYIPIQYVLSRYPSYGLNYYQQKPVALINNQFLPYPYYAKPAAVRSPAQILQWQVLPNTVPAKSCQAQPTTMTRHPHPHLSFMAIPPKKNQDKTEIPTINTIVSVEPTSTPTTEAIENTVATLEASSDVIESVPETNTAQVTSTVV

SEQ ID NO: 192 - protein, 194 aa, Bos mutus
MMKSFFLVVTILALTLPFLGAQEQNQEQPIRCEKDERFFSDKIAKYIPIQYVLSRYPSYGLNYYQQKPVALINNQFLPYPYYAKPAAVRSPAQILQWQVLSNTVPAKSCQAQPTTMARHPHPHLSFMAIPPKKNQDKTEIPTINTIASGEPTSTPTTEAVESTVATLEASPEASPEVIESPPEINTVQVTSTAV

SEQ ID NO: 193 - protein, 183 aa, Bos mutus
MMKSFFLVVTILALTLPFLRCEKDERFFSDKIAKYIPIQYVLSRYPSYGLNYYQQKPVALINNQFLPYPYYAKPAAVRSPAQILQWQVLSNTVPAKSCQAQPTTMARHPHPHLSFMAIPPKKNQDKTEIPTINTIASGEPTSTPTTEAVESTVATLEASPEASPEVIESPPEINTVQVTSTAV

SEQ ID NO: 194 - protein, 976 aa, Bos mutus
MTSGTAVQRADSSEEKRHRKRKKHHLIKSQILSYTEDRGFNEGQMKEDEQEKADSSEEVRHFHSLQKDKVNMKFFIFTCLLAVALAKNVKSLLKSKKHGTITRTSFKVQESHRENVDSQTISSICQNFIILDCRSSATRILCKRFKITVDDKHYQKALNEINQFYQKFPQYLQYLYQGPIVLNPWDQVKRNAVPITPTLVIKLIFIFFFHKESTEVFTKKTKLTEEEKNRLNFLKKISQRYQKFALPQYLKTVYQHQKAMKPWIQPKTKVIPYVDYSDNIGSPYPVNPSASISYPVTPSASIPCPVNPSASIPCPMPDRDFTPPVYLTKTNLPNDPAVPSNPLVFTALGAPLYSIAGLPISPFSGQLPPTGVFRLVPVSSRPIGPLYSPNEAAPSANTYIVEILVPPTTPPHTVPDVQPLTITEPDEAEPAADALAAPEPQSSISFDQLIPQHLMSASNSNELLLNLNNAQLRPLQLQGPFNPWIPPFPGILQQQQQNQVPGLSPFSLSTREWFAGLVPNQIFVPGQVSFAQGTQAGQLDPSQPQTPQQTQRGPKNVMPSVFFKMPQEQAQMLQYYPVYMFLPWEQPQQTVAQSPPQTREQLFEEQMPFYTEFGYIPQQVEPVMPVEQQQPVFDPFLGTAPEIAAMDRKAVIVITIKRQLAPFVRTILEPVTSISYNTIPEKDRTGKFEVSQDTEGEARSVSGSDELSSQFFFPPYQYPRSHYSRFLCPWWAYFYPPIPVPASVSATTPLNEKKKYQIHVNKVERPTEPTAKQELTVTRKGAMMKSFFLVVTILALTLPFLGAQEQNQEQPIRCEKDERFFSDKIAKYIPIQYVLSRYPSYGLNYYQQKPVALINNQFLPYPYYAKPAAVRSPAQILQWQVLSNTVPAKSCQAQPTTMARHPHPHLSFMAIPPKKNQDKTEIPTINTIASGEPTSTPTTEAVESTVATLEASPEASPEVIESPPEINTVQVTSTAV

SEQ ID NO: 195 - protein, 190 aa, Bos indicus
MMKSFFLVVTILALTLPFLGAQEQNQEQPIRCEKDERFFSDKIAKYIPIQYVLSRYPSYGLNYYQQKPVALINNQFLPYPYYAKPAAVRSPAQILQWQVLSNTVPAKSCQAQPTTMARHPHPHLSFMAIPPKKNQDKTEIPTINTIASGEPTSTPITEAVESTVATLEDSPEVIESPPEINTVQVTSTAV

SEQ ID NO: 196 - protein, 160 aa, Bos indicus
RCEKDERFFSDKIAKYIPIQYVLSRYPSYGLNYYQQKPVALINNQFLPYPYYAKPAAVRSPAQILQWQVLSNTVPAKSCQAQPTTMARHPHPHLSFMAIPPKKNQDKTEIPTINTIASGEPTSTPTIEAVESTVATLEDSPEVIESPPEINTVQVTSTAV

SEQ ID NO: 197 - protein, 160 aa, Bos indicus
RCEKDERFFSDKIAKYIPIQYVLSRYPSYGLNYYQQKPVALINNQFLPYPYYAKPAAVRSSAQILQWQVLSNTVPAKSCQAQPTTMARHPHPHLSFMAIPPKKNQDKTEIPTINTIASGEPTSTPTTEAVESTVATLEDSPEVIESPPEINTVQVTSTAV

SEQ ID NO: 198 - protein, 160 aa, Bos indicus
RCEKDERFFSDKIAKYIPIQYVLSRYPSYGLNYYQQKPVALINNQFLPYPYYAKPAAVRSSAQILQWQVLSNTVPAKSCQAQPTTMARHPHPHLSFMAIPPKKNQDKTEIPTINTIASGEPTSTPTIEAVESTVATLEASPEVIESPPEINTVQVTSTAV

SEQ ID NO: 199 - protein, 171 aa, Bos indicus
RCEKDERFFSDKIAKYIPIQYVLSRYPSYGLNYYQQKPVALINNQFLPYPYYAKPAAVRSPAQILQWQVLSNTVPAKSCQAQPTTMARHPHPHLSFMAIPPKKNQDKTEIPTINTIASGEPTSTPITEAVESTVATLEDSPEVIESPPEINTVQVRQLQSKNLRRHQRRQR

SEQ ID NO: 200 - protein, 171 aa, Bos indicus
RCEKDERFFSDKIAKYIPIQYVLSRYPSYGLNYYQQKPVALINNQFLPYPYYAKPAAVRSPAQILQWQVLSNTVPAKSCQAQPTTMARHPHPHLSFMAIPPKKNQDKTEIPTINTIASGEPTSTPITEAVESTVATLEDSPEVIESPPEINTVQVLNLQSKNLRRHQRRQR

SEQ ID NO: 201 - protein, 156 aa, Bos indicus
DERFFSDKIAKYIPIQYVLSRYPSYGLNYYQQKPVALINNQFLPYPYYAKPAAVRSPAQILQWQVLSNTVPAKSCQAQPTTMARHPHPHLSFMAIPPKKNQDKTEIPTINTIASGEPTSTPTIEAVESTVATLEASPEVIESPPEINTVQVTSTAV

SEQ ID NO: 202 - protein, 144 aa, Bos indicus
IPIQYVLSRYPSYGLNYYQQKPVALINNQFLPYPYYAKPAAVRSPAQILQWQVLSNTVPAKSCQAQPTTMARHPHPHLSFMAIPPKKNQDKTEIPTINTIASGEPTSTPTTEAVESTVATLEDSPEVIESPPEINTVQVTSTAV

SEQ ID NO: 203 - protein, 144 aa, Bos indicus
IPIQYVLSRYPSYGLNYYQQKPVALINNQFLPYPYYAKPAAVRSPAQILQWQVLSNTVPAKSCQAQPTTMARHPHPHLSFMAIPPKKNQDKTEIPTINTIASGEPTSTPITEAVESTVATLEDSPEVIESPPEINTVQVTSTAV

SEQ ID NO: 204 - protein, 141 aa, Bos indicus
QYVLSRYPSYGLNYYQQKPVALINNQFLPYPYYAKPAAVRSPAQILQWQVLSNTVPAKSCQAQPTTMARHPHPHLSFMAIPPKKNQDKTEIPTINTIASGEPTSTPTIEAVESTVATLEASPEVIESPPEINTVQVTSTAV

SEQ ID NO: 205 - protein, 139 aa, Bos indicus
VLSRYPSYGLNYYQQKPVALINNQFLPYPYYAKPAAVRSPAQILQWQVLSNTVPAKSCQAQPTTMARHPHPHLSFMAIPPKKNQDKTEIPTINTIASGEPTSTPITEAVESTVATLEDSPEVIESPPEINTVQVTSTAV

SEQ ID NO: 206 - protein, 210 aa, Jeotgalicoccus coquinae
MERPTEPTAKQELTVTRKGAMMKSFFLVVTILALTLPFLGAQEQNQEQPIRCEKDERFFSDKIAKYIPIQYVLSRYPSYGLNYYQQKPVALINNQFLPYPYYAKPAAVRSPAQILQWQVLSNTVPAKSCQAQPTTMARHPHPHLSFMAIPPKKNQDKTEIPTINTIASGEPTSTPTIEAVESTVATLEASPEVIESPPEINTVQVTSTAV

SEQ ID NO: 207 - protein, 184 aa, Jeotgalicoccus coquinae
LVVTILALTLPFLGAQEQNQEQLIRCEKEERFFNDKIAKYIPIQYVLSRYPSYGLNYYQQKPVALINNQFLPYPYYAKPAAVRSPAQILQWQVLPNTVPAKSCQAQPTTMTRHPHPHLSFMAIPPKKNQDKTEIPTINTIVSVEPTSTPTTEAIENTVATLEASSEVIESVPETNTAQVTSTVV

SEQ ID NO: 208 - protein, 190 aa, Bison bison
MMKSFFLVVTILALTLPFLGAQEQNQEQPIRCEKDERFFSDKIAKYIPIQYVLSRYPSYGLNAYQQKPVALINNQFLPYPYYAKPAAVRSPAQILQWQVLSNTVPAKSCQAQPTTMARHPHPHLSFMAIPPKKNQDKTEIPTINTIASGEPTSTPTTEAVESTVATLEASPEVIESPPEINTVQVTSTVV

SEQ ID NO: 209 - protein, 179 aa, Bison bison
MMKSFFLVVTILALTLPFLRCEKDERFFSDKIAKYIPIQYVLSRYPSYGLNAYQQKPVALINNQFLPYPYYAKPAAVRSPAQILQWQVLSNTVPAKSCQAQPTTMARHPHPHLSFMAIPPKKNQDKTEIPTINTIASGEPTSTPTTEAVESTVATLEASPEVIESPPEINTVQVTSTVV

SEQ ID NO: 210 - protein, 190 aa, Bos grunniens
MMKSFFLVVTILALTLPFLGAQEQNQEQPIRCEKDERFFSDKIAKYIPIQYVLSRYLSYGLNYYQQKPVALINNQFLPYPYYAKPAAVRSPAQILQWQVLSNTVPAKSCQAQPTTMARHPHPHLSFMAIPPKKNQDKTEIPTINTIASGERTSTPTTEAVESTVATLEASPEVIESPPEINTVQVTSTAV

SEQ ID NO: 211 - protein, 194 aa, Bos grunniens
MMKSFFLVVTILALTLPFLGAQEQNQEQPIRCEKDERFFSDKIAKYIPIQYVLSRYPSYGLNYYQQKPVALINNQFLPYPYYAKPAAVRSPAQILQWQVLSSTVPAKSCQAQPTTMARHPHPHLSFMAIPPKKNQDKTEIPTINTIASGEPTSTPTTEAVESTVATLEASPEASPEVIESPPEINTVQVTSTAV

SEQ ID NO: 212 - protein, 160 aa, Bos grunniens
RCEKDERFFSDKIAKYIPIQYVLSRYPSYGLNYYQQKPVALINNQFLPYPYYAKPAAVRSPAQILQWQVLSNTVPAKSCQAQPTTMARHPHPHLSFMAIPPKKNQDKTEIPTINTIASGEPTSTPTTEAVESTVATLEASPEVIESPPEINTVQVTSTAV

SEQ ID NO: 213 - protein, 160 aa, Bos grunniens
RCEKDERFFSDKIAKYIPIQYVLSRYLSYGLNYYQQKPVALINNQFLPYPYYAKPAAVRSPAQILQWQVLSNTVPAKSCQAQPTTMARHPHPHLSFMAIPPKKNQDKTEIPTINTIASGEPTSTPTTEAVESTVATLEASPEVIESPPEINTVQVTSTAV

SEQ ID NO: 214 - protein, 164 aa, Bos grunniens
RCEKDERFFSDKIAKYIPIQYVLSRYPSYGLNYYQQKPVALINNQFLPYPYYAKPAAVRSPAQILQWQVLSNTVPAKSCQAQPTTMARHPHPHLSFMAIPPKKNQDKTEIPTINTIASGEPTSTPTTEAVESTVATLEASPEASPEVIESPPEINTVQVTSTAV

SEQ ID NO: 215 - protein, 160 aa, Bos grunniens
RCEKDERFFSDKIAKYIPIQYVLSRYLSYGLNYYQQKPVALINNQFLPYPYYAKPAAVRSPAQILQWQVLSNTVPAKSCQAQPTTMARHPHPHLSFMAIPPKKNQDKTEIPTINTIASGERTSTPTTEAVESTVATLEASPEVIESPPEINTVQVTSTAV

SEQ ID NO: 216 - protein, 160 aa, unidentified; identical to SEQ ID NO: 96
  REGION 1..160: note = Bos indicus x Bos taurus

SEQ ID NO: 217 - protein, 160 aa, unidentified
  REGION 1..160: note = Bos indicus x Bos taurus
RCEKDERFFSDKIAKYIPIQYVLSRYPSYGLNYYQQKPVALINNQFLPYPYYAKPAAVRSPAQILQWQVLSNTVPAKSCQAQPTTMARHPHPHLAFMAIPPKKNQDKTEIPTINTIASGEPTSTPTTEAVESTVATLEDSPEVIESPPEINTVQVTSTAV

SEQ ID NO: 218 - protein, 192 aa, Oreamnos americanus
MMKSFFLVVTILALTLPFLGAQEQNQEQPICCEKDERFFDDKIAKYIPIQYVLSRYPSYGLNYYQQRPVALINNQFLPYPYYAKPVAVRSPAQILQWQVLPNTAPAKSCQDQPTTMARHPHPHLSFMAIPPKKDQDKTEIPTINTIASAEPTVHSTPTTEAIVNTVDNPEASSESIVSAPETNTAQVTSTEV

SEQ ID NO: 219 - protein, 192 aa, Naemorhedus goral
MMKSFFLVVTILALTLPFLGAQEQNQEQPICCEKDERFFDDKIAKYIPIQYVLSRYPSYGLNYYQQRPVALINNQFLPYPYYAKPVAVRSPAQTLQWQVLPNTAPAKSCQDQPTTMARHPHPHLSFMAIPPKKDQDKTEIPTINTIASAEPTVHSTPTTEAIVNTVDNPEASSESIASAPETNTAQVTSTEV

SEQ ID NO: 220 - protein, 190 aa, Odocoileus virginianus
MMKSFSLVVTILALTLPFLVAQEQNQEQPTGCEKDERFFNDKIVKYIPIQYVLSRYPSYGLSYYQHRPVALINNQFLPYPYYAKPGAVRSPAQILQWQVLPNTVPAKSCQAQPTTLARHPHPRLSFMAIPPKKNQDKTDIPTINTIATVESTITPTTEAIVDTVATPEASSEVIESAPETKTDQVTSTVV

SEQ ID NO: 221 - protein, 192 aa, Capricornis sumatraensis
MMKSFFLVVTILALTLPFLGAQEQNQEQPICCEKDERFFDDKIAKYIPIQYVLSRYPSYGLNYYQQRPVALINNQFLPYPYYAKPVAVRSPAQTLQWQVLPNTAPAKSCQDQPTTMARHPHPHLSFMAIPPKKDQDKTEIPTINTIASAEPTVHSTPTTEAIVNTVDNPEASSESIVSAPETNTAQVTSTEV

SEQ ID NO: 222 - protein, 192 aa, Capricornis crispus
MMKSFFLAVTILALTLPFLGAQEQNQEQPICCEKDETFFDDKIAKYIPIQYVLSRYPSYGLNYYQQRPVALINNQFLPYPYYAKPVAVRSPAQTLQWQVLPNTVPAKSCQDQPTTMARHPHPHLSFMAIPPKKDQDKTEIPTINTIASAEPTVHSTPTTEAIVNTVDNPEASSESIVSAPETNTAQVTSTEV

SEQ ID NO: 223 - protein, 192 aa, Capricornis crispus
MMKSFFLVVTILALTLPFLGAQEQNQEQPICCEKDETFFDDKIAKYIPIQYVLSRYPSYGLNYYQQRPVALINNQFLPYPYYAKPVAVRSPAQTLQWQVLPNTVPAKSCQDQPTTMARHPHPHLSFMAIPPKKDQDKTEIPTINTIASAEPTVHSTPTTEAIVNTVDNPEASSESIVSAPETNTAQVTSTEV

SEQ ID NO: 224 - protein, 192 aa, Capricornis swinhoei [sequence omitted]

SEQ ID NO: 225 - protein, 202 aa, Saiga tatarica
MMKSFFLVVTILALTLPFLDAQERNQEQPICCEKDERFFNDRIAKYIPIQYVLSRYPSYGLNYYQQRPVALINNQFLPYPYYAKPVAVRSPAQTLQWQVLPNTVPAKSCQDQPTTMARHPHPHLSFMAIPPKKDQDKTEIPTINTVASAEPASTPTTEAIVNTEAIVNTEAIVNTVDNPEASSEIIASVPETNTAQVTSTEV

SEQ ID NO: 226 - protein, 192 aa, Rupicapra rupicapra
MMKSFFLVATILALTLPFLGAQEQNQEQSICCEKDERFFEDKIAKYIPIQYVLSRYPSYGLNYYQQRPVALINNQFLPYPYYAKPVAVRSPAQTLQWQVLPNTAPAKSCQDQPTTMAHHPHPHLSFMAIPPKKDQDKTEIPTINTIASAEPTVHSTPTTEAIVNTVDNPEASSESIASAPETNTAQVTSTEV

SEQ ID NO: 227 - protein, 190 aa, Cervus nippon
MMKSFFLAVTILALTLPFLVAQEQIQEQPTGCEKDERFFNDKIVKYIPIQYALSRYPSYGLNYYQHRPVALINNQFLPYPYYVKPGAVRSPAQILQWQVLPNTVPAKFCQAQPTTMARHPHPRLSFMAIPPKKNQDKTDIPSINTIATAESTITPTTEAIVDTVATQEAFSEVIESAPEAKTDQVTSTVV

SEQ ID NO: 228 - protein, 139 aa, Bos frontalis
VLSRYPSYGLNYYQQKPVALINNQFLPYPYYAKPAAVRSPAQILQWQVLSNTVPAKSCQAQPTTMARHPHPHLSFMAIPPKKNQDKTEIPTINTIASGEPTSTPTTEAVESTVATLEASPEVIESPPEINTVQVTSTAV

SEQ ID NO: 229 - protein, 170 aa, Muntiacus reevesi
AQELNQEQPTGCEKDERFFNDKIVKYIPIQYALSRYPSYGLNYYQHRPVALISNQFLPYPYYAKPGAVRSPAQILQWQALPNTVPATSCQAQPATVARHPHPRLSFMAIPPKKSQDKTDHPTINTIATVESTATPTTEAVVDTAATQEASPEVIASAPEASTDQVTSTAV

SEQ ID NO: 230 - protein, 170 aa, Muntiacus muntjak
AQELNQEQPTGCEKDERFFNDKIVKYIPIQYALSRYPSYGLNYYQHRPVALISNQFLPYPYYAKPGAVRSPAQTLQWQALPNTVPATSCQAQPATMARHPHPRLSFMAIPPKKTQDKTDHPTFNTIATAESTATPTTEAVVDTVATQEASSEVTASAPEANTDQVTSTAV

SEQ ID NO: 231 - protein, 160 aa, Madoqua saltiana
CCEKDERFFNDKIAKYIPIQYVLSRYPSYGLNYYQQRPVALINNQFLPYPYFAKPVAVRSPAQTLQWQVLPNTVPAKSCQDQPTTMARHPHPHLSFMAIPPKKDQDKPEIPTINTIASAELTSTPTTEAIVNTVDNPEASSEIIASVPETNTAEVTSTEV

SEQ ID NO: 232 - protein, 172 aa, Gazella dorcas
CCEKDERFFNDKIAKYIPIQYVLSRYPSYGLNYYQQRPVALINNQFLPYPYYAKPVAVRSPAQTLQWQVLPNTVPAKSCQDQPTTMARHPHPHLSFMAIPPKKDQDKTEIPTINTIASAEPASTPTTEAIVNTEAIVNTEPIVNTVDNPEASSEIIASVPETNTAQVTSTEV

SEQ ID NO: 233 - protein, 178 aa, Gazella arabica
  VARIANT 178: note = X can be any naturally occurring amino acid
CCEKDERFFNDKIAKYIPIQYVLSRYPSYGLNYYQQRPVALINNQFLPYPYYAKPVAVRSPAQTLQWQVLPNTVPAKSCQDQPTTMARHPHPHLSFMAIPPKKDQDKTEIPTINTIASAEPASTPTTEAIVNTEAVVNTEAIVNTEAIVNTVDNPEASSEIIASVPETNTAQVTSTEX

SEQ ID NO: 234 - protein, 162 aa, Capra ibex ibex
CCEKDERFFDDKIAKYIPIQYVLNRYPTYGLNYYQQRPVALINNQFLPYPYYAKPVAVRSPAQTLQWQVLPNTVPAKSCQDQPTTLARHPHPHLSFMAIPPKKDQDKTEIPAINTIASAEPTVHSTPTTEAIVNTVDNPEASSESIASAPETNTAQVTSTEV

SEQ ID NO: 235 - protein, 162 aa, Ovis ammon severtzovi
  VARIANT 73: note = X can be any naturally occurring amino acid
CCEKDERFFDDKIAKYIPIQYVLSRYPSYGLNYYQQRPVALINNQFLPYPYYAKPVAVRSPAQTLQWQVLPNXVPAKSCQDQPTAMARHPHPHLSFMAIPPKKDQDKTEIPAINTIASAEPTVHSTPTTEAVVNAVDNPEASSESIASAPETNTAQVTSTEV

SEQ ID NO: 236 - protein, 162 aa, Ovis orientalis
CCEKDERFFDDKIAKYIPIQYVLSRYPSYGLNYYQQRPVALINNQFLPYPYYAKPVAVRSPAQTLQWQVLPNTVPAKSCQDQPTAMARHPHPHLSFMAIPPKKDQDKTEIPAINTIASAEPTVHSTPTTEAVVNAVDNPEASSESIASAPETNTAQVTSTEV

SEQ ID NO: 237 - protein, 162 aa, Ovis orientalis
CCEKDERFFDDKIAKYIPIQYVLSRYPSYGLNYYQQRPVALINNQFLPYPYYAKPVAVRSPAQTLQWQVLPNAVPAKSCQDQPTAMARHPHPHLSFMAIPPKKDQDKTEIPAINTIASAEPTVHSTPTTEAVVNAVDNPEASSESIASAPETNTAQITSTEV

SEQ ID NO: 238 - protein, 463 aa, Cervus hanglu yarkandensis
QEVKVTVDNKHYQKVLNEISQFYQKFPQYLQYLYQGPIVMNPWEQVKRTAGPFIPTVVSAAFLYVSCLFGFLFKTKLTEEEKNRLNFLKKISQYYQKFAWPQYLKTVYQYQKAMKPWTQPKTNAIPYVLIPQRLMSASNSNELLLNLNNAQLQPLQLQGPFNSWIPPFPGILQQQQQDQIPGLSPFSLSTLERFAGLVPNQIFVPGQVGFAQGTQAGQLDPSQPQTPQQTQRGPKNVMPSLLSLKMPQEQAQLLQYYPVYMFLPWEQPQQTVAQSPPQTRLQLFEEQMPYYTEFGYIPQQVEPGCEKDERFFNDKIVKYIPIQYALSRYPSYGLNYYQHRPVALINNQFLPYPYYVKPGAVRSPAQILQWQVLPNTVPAKFCQAQPTTMARHPHPRLSFMAIPPKKNQDKTDIPSINTIATAESTITPTTEAIVDTVATQEASSEVIESAPEAKTDQVTSTVV

SEQ ID NO: 239 - protein, 160 aa, Procapra gutturosa
CCEKDERFFNDKIAKYIPIQYVMSRYPSYGLNYYQQRPVALINNQFLPYPYYAKPVAVRSPAQTLQWQVLPNTVPAKSCQDQPTTMARHPHPHLSFMAIPPKKDQDKTEIPTINTIASAEPTSTPTTEAIVNTVDNPEATSEIIASVPETNTAQVTSTEV

SEQ ID NO: 240 - protein, 160 aa, Procapra gutturosa
  VARIANT 111: note = X can be any naturally occurring amino acid
  VARIANT 121: note = X can be any naturally occurring amino acid
  VARIANT 125: note = X can be any naturally occurring amino acid
  VARIANT 139: note = X can be any naturally occurring amino acid
CCEKDERFFNDKIAKYIPIQYVMSRYPSYGLNYYQQRPVALINNQFLPYPYYAKPVAVRSPAQTLQWQVLPNTVPAKSCQDQPTTMARHPHPHLSFMAIPPKKDQDKTEIXTINTIASAEXTSTXTTEAIVNTVDNPEXTSEIIASVPETNTAQVTSTEV

SEQ ID NO: 241 - protein, 190 aa, Bos taurus; identical to SEQ ID NO: 150

SEQ ID NO: 242 - protein, 190 aa, Bos taurus; identical to SEQ ID NO: 152

SEQ ID NO: 243 - protein, 190 aa, Bos taurus; identical to SEQ ID NO: 149

SEQ ID NO: 244 - protein, 190 aa, Bos taurus; identical to SEQ ID NO: 148

SEQ ID NO: 245 - protein, 160 aa, Bos taurus; identical to SEQ ID NO: 160

SEQ ID NO: 246 - protein, 169 aa, Bos taurus; identical to SEQ ID NO: 151

SEQ ID NO: 247 - protein, 179 aa, Bos taurus; identical to SEQ ID NO: 155

SEQ ID NO: 248 - protein, 160 aa, Bos taurus; identical to SEQ ID NO: 157

SEQ ID NO: 249 - protein, 160 aa, Bos taurus; identical to SEQ ID NO: 153

SEQ ID NO: 250 - protein, 106 aa, Bos taurus
AEQQNEEEPIRCEKDERFFSDKIAKYIPIQYVLSRYPSYGLNYYQQKPVALINNQFLPYPYYAKPAAVRSPAQILQWQVLSNTVPAKSCQAQPTTMARHPPHHLSF

SEQ ID NO: 251 - protein, 160 aa, Bos taurus; identical to SEQ ID NO: 154

SEQ ID NO: 252 - protein, 160 aa, Bos taurus; identical to SEQ ID NO: 158

SEQ ID NO: 253 - protein, 159 aa, Bos taurus; identical to SEQ ID NO: 156

SEQ ID NO: 254 - protein, 210 aa, Jeotgalicoccus coquinae; identical to SEQ ID NO: 206

SEQ ID NO: 255 - protein, 184 aa, Jeotgalicoccus coquinae; identical to SEQ ID NO: 207

SEQ ID NO: 256 - protein, 194 aa, Bos mutus; identical to SEQ ID NO: 192

SEQ ID NO: 257 - protein, 183 aa, Bos mutus; identical to SEQ ID NO: 193

SEQ ID NO: 258 - protein, 976 aa, Bos mutus; identical to SEQ ID NO: 194

SEQ ID NO: 259 - protein, 190 aa, Bos indicus; identical to SEQ ID NO: 195

SEQ ID NO: 260 - protein, 160 aa, Bos indicus; identical to SEQ ID NO: 196

SEQ ID NO: 261 - protein, 171 aa, Bos indicus; identical to SEQ ID NO: 199

SEQ ID NO: 262 - protein, 171 aa, Bos indicus; identical to SEQ ID NO: 200

SEQ ID NO: 263 - protein, 160 aa, Bos indicus; identical to SEQ ID NO: 197

SEQ ID NO: 264 - protein, 160 aa, Bos indicus; identical to SEQ ID NO: 198

SEQ ID NO: 265 - protein, 156 aa, Bos indicus; identical to SEQ ID NO: 201

SEQ ID NO: 266 - protein, 194 aa, Bos grunniens; identical to SEQ ID NO: 211

SEQ ID NO: 267 - protein, 190 aa, Bos grunniens; identical to SEQ ID NO: 210

SEQ ID NO: 268 - protein, 160 aa, Bos grunniens; identical to SEQ ID NO: 212

SEQ ID NO: 269 - protein, 164 aa, Bos grunniens; identical to SEQ ID NO: 214

SEQ ID NO: 270 - protein, 160 aa, Bos grunniens; identical to SEQ ID NO: 213

SEQ ID NO: 271 - protein, 190 aa, Bison bison; identical to SEQ ID NO: 208

SEQ ID NO: 272 - protein, 179 aa, Bison bison; identical to SEQ ID NO: 209

SEQ ID NO: 273 - protein, 190 aa, Bubalus bubalis; identical to SEQ ID NO: 186

SEQ ID NO: 274 - protein, 190 aa, Bubalus bubalis; identical to SEQ ID NO: 190

SEQ ID NO: 275 - protein, 190 aa, Bubalus bubalis; identical to SEQ ID NO: 187

SEQ ID NO: 276 - protein, 190 aa, Bubalus bubalis; identical to SEQ ID NO: 189

SEQ ID NO: 277 - protein, 190 aa, Bubalus bubalis; identical to SEQ ID NO: 188

SEQ ID NO: 278 - protein, 190 aa, Bubalus bubalis; identical to SEQ ID NO: 191

SEQ ID NO: 279 - protein, 192 aa, Oreamnos americanus; identical to SEQ ID NO: 218

SEQ ID NO: 280 - protein, 192 aa, Capricornis swinhoei [sequence omitted]

SEQ ID NO: 281 - protein, 192 aa, Naemorhedus goral; identical to SEQ ID NO: 219

SEQ ID NO: 282 - protein, 192 aa, Capricornis sumatraensis; identical to SEQ ID NO: 221

SEQ ID NO: 283 - protein, 192 aa, Capricornis crispus; identical to SEQ ID NO: 222

SEQ ID NO: 284 - protein, 192 aa, Capricornis crispus; identical to SEQ ID NO: 223

SEQ ID NO: 285 - protein, 202 aa, Saiga tatarica; identical to SEQ ID NO: 225

SEQ ID NO: 286 - protein, 160 aa, unidentified; identical to SEQ ID NO: 96
  REGION 1..160: note = Bos indicus x Bos taurus

SEQ ID NO: 287 - protein, 160 aa, unidentified; identical to SEQ ID NO: 217
  REGION 1..160: note = Bos indicus x Bos taurus

SEQ ID NO: 288 - protein, 192 aa, Capra hircus; identical to SEQ ID NO: 169

SEQ ID NO: 289 - protein, 192 aa, Capra hircus; identical to SEQ ID NO: 166

SEQ ID NO: 290 - protein, 192 aa, Capra hircus; identical to SEQ ID NO: 174

SEQ ID NO: 291 - protein, 192 aa, Capra hircus; identical to SEQ ID NO: 165

SEQ ID NO: 292 - protein, 161 aa, Capra hircus; identical to SEQ ID NO: 168

SEQ ID NO: 293 - protein, 161 aa, Capra hircus; identical to SEQ ID NO: 171

SEQ ID NO: 294 - protein, 162 aa, Capra hircus; identical to SEQ ID NO: 167

SEQ ID NO: 295 - protein, 162 aa, Capra hircus; identical to SEQ ID NO: 177

SEQ ID NO: 296 - protein, 162 aa, Capra hircus; identical to SEQ ID NO: 175

SEQ ID NO: 297 - protein, 161 aa, Capra hircus; identical to SEQ ID NO: 180

SEQ ID NO: 298 - protein, 162 aa, Capra hircus; identical to SEQ ID NO: 170

SEQ ID NO: 299 - protein, 162 aa, Capra hircus; identical to SEQ ID NO: 172

SEQ ID NO: 300 - protein, 161 aa, Capra hircus; identical to SEQ ID NO: 178

SEQ ID NO: 301 - protein, 162 aa, Capra hircus; identical to SEQ ID NO: 182

SEQ ID NO: 302 - protein, 162 aa, Capra hircus; identical to SEQ ID NO: 179

SEQ ID NO: 303 - protein, 159 aa, Capra hircus
CCEKDERFFDDKIAKYIPIQYVLSRYPSYGLNYYQQRPVALINNQFLPYPYYAKPVAVRSPAQTLQWQVLPNTVPAKSCQDQPTTLARHPHPHLSFMAIPPKKDQDKTEIPAINTIASAEPTVHSTPTTEAIVNTVDNPEASSESIASASETNTAQVTS

SEQ ID NO: 304 - protein, 159 aa, Capra hircus
CCEKDERFFDDKIAKYIPIQYVLSRYPSYGLNYYQQRPVALINNQFLPYPYYAKPVAVRSPAQTLQWQVLPNTVPAKSCQDQPTTLARHPHPHLSFMAIPPKKDQDKTEVPAINTIASAEPTVHSTPTTEAIVNTVDNPEASSESIASASETNTAQVTS

SEQ ID NO: 305 - protein, 141 aa, Capra hircus
  VARIANT 110: note = X can be any naturally occurring amino acid
CCEKDERFFDDKIAKYIPIQYVLSRYPSYGLNYYQQRPVALINNQFLPYPYYAKPVAVRSPAQTLQWQVLPNTVPAKSCQDQPTTLARHPHPHLSFMAIPPKKDQDKTEXPAINTIASAEPTVHSTPTTEAIVNTVDNPEA

SEQ ID NO: 306 - protein, 162 aa, Capra hircus; identical to SEQ ID NO: 181

SEQ ID NO: 307 - protein, 161 aa, Capra hircus; identical to SEQ ID NO: 173

SEQ ID NO: 308 - protein, 162 aa, Capra hircus; identical to SEQ ID NO: 176

SEQ ID NO: 309 - protein, 162 aa, Capra hircus; identical to SEQ ID NO: 183

SEQ ID NO: 310 - protein, 162 aa, Capra hircus
CCEKDERFFDDKIAKYIPIQYVLSRYPSYGLNYYQQRPVALINSQFLPYPYYAKPVAVRSPAQTLQWQVLPNTVPAKSCQDQPTTLARHPHPHLSFMAIPPKKDQDKTEIPAINTIASAEPTVHSTPTTEAIVNTVDNPEASSESIASASETNTAQVTSTEV

SEQ ID NO: 311 - protein, 190 aa, Odocoileus virginianus; identical to SEQ ID NO: 220

SEQ ID NO: 312 - protein, 192 aa, Rupicapra rupicapra; identical to SEQ ID NO: 226

SEQ ID NO: 313 - protein, 192 aa, Ovis aries; identical to SEQ ID NO: 184

SEQ ID NO: 314 - protein, 162 aa, Ovis aries; identical to SEQ ID NO: 185

SEQ ID NO: 315 - protein, 190 aa, Cervus nippon; identical to SEQ ID NO: 227

SEQ ID NO: 316 - protein, 178 aa, Gazella arabica; identical to SEQ ID NO: 233
  VARIANT 178: note = X can be any naturally occurring amino acid

SEQ ID NO: 317 - protein, 170 aa, Muntiacus muntjak; identical to SEQ ID NO: 230

SEQ ID NO: 318 - protein, 170 aa, Muntiacus reevesi; identical to SEQ ID NO: 229

SEQ ID NO: 319 - protein, 172 aa, Gazella dorcas
  VARIANT 136: note = X can be any naturally occurring amino acid
  VARIANT 151: note = X can be any naturally occurring amino acid
  VARIANT 154: note = X can be any naturally occurring amino acid
  VARIANT 161: note = X can be any naturally occurring amino acid
  VARIANT 168: note = X can be any naturally occurring amino acid
CCEKDERFFNDKIAKYIPIQYVLSRYPSYGLNYYQQRPVALINNQFLPYPYYAKPVAVRSPAQTLQWQVLPNTVPAKSCQDQPTTMARHPHPHLSFMAIPPKKDQDKTEIPTINTIASAEPASTPTTEAIVNTEPXVNTEPIVNTVDNPEXSSXIIASVPXTNTAQVXSTEV

SEQ ID NO: 320 - protein, 160 aa, Procapra gutturosa; identical to SEQ ID NO: 239

SEQ ID NO: 321 - protein, 160 aa, Procapra gutturosa; identical to SEQ ID NO: 240
  VARIANT 111: note = X can be any naturally occurring amino acid
  VARIANT 121: note = X can be any naturally occurring amino acid
  VARIANT 125: note = X can be any naturally occurring amino acid
  VARIANT 139: note = X can be any naturally occurring amino acid

SEQ ID NO: 322 - protein, 160 aa, Madoqua saltiana; identical to SEQ ID NO: 231

SEQ ID NO: 323 - protein, 155 aa, Ammotragus lervia
  VARIANT 138: note = X can be any naturally occurring amino acid
CCEKDERFFDDKIAKYIPIQYVLSRYPSYGLNYYQQRPVALINNQFLPYPYYAKPVAVRSPAQTLQWQVLPNTAPAKSCQDQPTTMARHPHPHLSFMAIPPKKDQDKTEIPAINTIASVEPTVHSTPTAEAIVNTVDXPEASSESIASAPETNTA

SEQ ID NO: 324 - protein, 155 aa, Ammotragus lervia
CCEKDERFFDDKIAKYIPIQYVLSRYPSYGLNYYQQRPVALINNQFLPYPYYAKPVAVRSPAQTLQWQVLPNTAPAKSCQDQPTTMARHPHPHLSFMAIPPKKDQDKTEIPAINTIASVEPTVHSTPTAEAIVNTVDSPEASSESIASAPETNTA

SEQ ID NO: 325 - protein, 155 aa, Ammotragus lervia
CCEKDERFFDDKIAKYIPIQYVLSRYPSYGLNYYQQRPVALINNQFLPYPYYAKPVAVRSPAQTLQWQVLPNTAPAKSCQDQPTTMARHPHPHLSFMAIPPKKDQDKTEIPAINTIASVEPTVHSTPTAEAIVNTVDNPEASSESIASAPETNTA

SEQ ID NO: 326 - protein, 162 aa, Capra sibirica
CCEKDERFFDDKIAKYIPIQYVLSRYPSYGLNYYQQRPVALINNQFLPYPYYAKPVAVRSPAQTLQWQVLPNTVPAKSCQDQPTTLARHPHPHLSFMAIPPKKDQDKTEVPAINTIASAEPTVHSTPTTEAIVNTVDNPEASSESIASASETNTGQVTSTEV

SEQ ID NO: 327 - protein, 162 aa, Ovis canadensis
CCEKDERFFDDKIAKYIPIQYVLSRYPSYGLNYYQQRPVALINNQFLPYPYYAKPVAVRSPAQTLQWQVLPNTVPAKSCQDQPTTMAHHPHPHLSFMAIPPKKDQDKTEIPAINTIASVEPTVHSTPTTEAVVNTVDNPEASSESIASAPETNAAQVTTTEV

SEQ ID NO: 328 - protein, 162 aa, Ovis canadensis
  VARIANT 155..156: note = X can be any naturally occurring amino acid
CCEKDERFFDDKIAKYIPIQYVLSRYPSYGLNYYQQRPVALINNQFLPYPYYAKPVAVRSPAQTLQWQVLPNTVPAKSCQDQPTTMAHHPHPHLSFMAIPPKKDQDKTEIPAINTIASVEPTVHSTPTTEAVVNTVDNPEASSESIASAPETNAXXVTTTEV

SEQ ID NO: 329 - protein, 178 aa, Gazella subgutturosa marica
CCEKNERFFNDKIAKYIPIQYVLSRYPSYGLNYYQQRPVALINNQFLPYPYYVKPVAVRSPAQTLQWQVLPNTVPAKSCQDQPTTMARHPHPHLSFMAIPPKKDQDKTEIPTINTIASAEPASTPTTEAIVNTEAVVNTEAIVNTEAIVNTVDNPEASSEIIASVPETNTAQVTSTEV

SEQ ID NO: 330 - protein, 172 aa, Antilope cervicapra
  VARIANT 33: note = X can be any naturally occurring amino acid
  VARIANT 135: note = X can be any naturally occurring amino acid
GCEKDERFFNDKIAKYIPIQYVLSRYPSYGLNXYQQRPVALINNQFLPYPYYVKPVAVRSPAQTLQWQVLPNTVPAKSCQDQPTTMARHPHPHLSFMAIPPKKDQDKTEIPTINTIASAEPASTPTTEAIVNTEXIVNTEPIVNTVDNPEASSEIIASVPETNTAQVTSTEV

SEQ ID NO: 331 - protein, 162 aa, Capra ibex ibex; identical to SEQ ID NO: 234

SEQ ID NO: 332 - protein, 162 aa, Ovis vignei
CCEKDERFFDDKIAKYIPIQYVLSRYPSYGLNYYQQRPVALINNQFLPYPYYAKPVAVRSPAQTLQWQVLPNAVPAKSCQDQPTAMARHPHPHLSFMAIPPKKDQDKTEIPAINTIASAEPTVHSTPTTEAVVNAVDNPEASSESIASAPETNTAQVTSTES

SEQ ID NO: 333 - protein, 162 aa, Ovis vignei
  VARIANT 73: note = X can be any naturally occurring amino acid
  VARIANT 162: note = X can be any naturally occurring amino acid
CCEKDERFFDDKIAKYIPIQYVLSRYPSYGLNYYQQRPVALINNQFLPYPYYAKPVAVRSPAQTLQWQVLPNXVPAKSCQDQPTAMARHPHPHLSFMAIPPKKDQDKTEIPAINTIASAEPTVHSTPTTEAVVNAVDNPEASSESIASAPETNTAQVTSTEX

SEQ ID NO: 334 - protein, 162 aa, Ovis ammon collium
  VARIANT 156: note = X can be any naturally occurring amino acid
CCEKDERFFDDKIAKYIPIQYVLSRYPSYGLNYYQQRPVALINNQFLPYPYYAKPVAVRSPAQTLQWQVLPNAVPAKSCQDQPTAMARHPHPHLSFMAIPPKKDQDKTEIPAINTIASAEPTVHSTPTTEAVVNAVDNPEASSESIASAPETNTAXVTSTEV

SEQ ID NO: 335 - protein, 162 aa, Ovis vignei
  VARIANT 112: note = X can be any naturally occurring amino acid
CCEKDERFFDDKIAKYIPIQYVLSRYPSYGLNYYQQRPVALINNQFLPYPYYAKPVAVRSPAQTLQWQVLPNAVPAKSCQDQPTAMARHPHPHLSFMAIPPKKDQDKTEIPXINTIASAEPTVHSTPTTEAVVNAVDNPEASSESIASAPETNTAQVTSTEV

SEQ ID NO: 336 - protein, 162 aa, Ovis orientalis; identical to SEQ ID NO: 236

SEQ ID NO: 337 - protein, 162 aa, Ovis orientalis; identical to SEQ ID NO: 237

SEQ ID NO: 338 - protein, 162 aa, unidentified
  REGION 1..162: note = Ovis orientalis x vignei
  VARIANT 107: note = X can be any naturally occurring amino acid
CCEKDERFFDDKIAKYIPIQYVLSRYPSYGLNYYQQRPVALINNQFLPYPYYAKPVAVRSPAQTLQWQVLPNAVPAKSCQDQPTAMARHPHPHLSFMAIPPKKDQDXTEIPAINTIASAEPTVHSTPTTEAVVNAVDNPEASSESIASAPETNTAQVTSTEV

SEQ ID NO: 339 - protein, 162 aa, Ovis vignei
  VARIANT 154: note = X can be any naturally occurring amino acid
CCEKDERFFDDKIAKYIPIQYVLSRYPSYGLNYYQQRPVALINNQFLPYPYYAKPVAVRSPAQTLQWQVLPNAVPAKSCQDQPTAMARHPHPHLSFMAIPPKKDQDKTEIPAINTIASAEPTVHSTPTTEAVVNAVDNPEASSESIASAPETNXAQVTSTEV

SEQ ID NO: 340 - protein, 162 aa, Ovis ammon severtzovi; identical to SEQ ID NO: 235
  VARIANT 73: note = X can be any naturally occurring amino acid

SEQ ID NO: 341 - protein, 205 aa, Bos taurus
VSAALARPKHPIKHQGLPQEVLNENLLRFFVAPFPEVFGKEKVNELSKDIGSESTEDQAMEDIKQMEAESISSSEEIVPNSVEQKHIQKEDVPSERYLGYLEQLLRLKKYKVPQLEIVPNSAEERLHSMKEGIHAQQKEPMIGVNQELAYFYPELFRQFYQLDAYPSGAWYYVPLGTQYTDAPSFSDIPNPIGSENSEKTTMPLW

SEQ ID NO: 342 - protein, 215 aa, Bos taurus
MKLLILTCLVAVALARPKHPIKHQGLPQEVLNENLLRFFVAPFPEVFGKEKVNELSKDIGSESTEDQAMEDIKQMEAESISSSEEIVPNSVEQKHIQKEDVPSERYLGYLEQLLRLKKYKVPQLEIVPNSAEERLHSMKEGIHAQQKEPMIGVNQELAYFYPELFRQFYQLDAYPSGAWYYVPLGTQYTDAPSFSDIPNPIGSENSEKTTMPLWW

SEQ ID NO: 343 - protein, 206 aa, Bos taurus
LVAVALARPKHPIKHQGLPQEVLNENLLRFFVAPFPEVFGKEKVNELSKDIGSESTEDQAMEDIKQMEAESISSSEEIVPNSVEQKHIQKEDVPSERYLGYLEQLLRLKKYKVPQLEIVPNSAEERLHSMKEGIHAQQKEPMIGVNQELAYFYPELFRQFYQLDAYPSGAWYYVPLGTQYTDAPSFSDIPNPIGSENSEKTTMPLW

SEQ ID NO: 344 - protein, 214 aa, Bos taurus
MKLLILTCLVAVALARPKHPIKHQGLPQEVLNENLLRFFVAPFPEVFGKEKVNELSKDIGSESTEDQAMEDIKQMEAESISSSEEIVPNSVEQKHIQKDDVPSERYLGYLEQLLRLKKYKVPQLEIVPNSAEERLHSMKEGIHAQQKEPMIGVNQELAYFYPELFRQFYQLDAYPSGAWYYVPLGTQYTDAPSFSDIPNPIGSENSGKTTMPLW

SEQ ID NO: 345 - protein, 213 aa, Bos taurus
MKLLILTCLVAVALARPKHPIKHQGLPQEVLNENLLRFFVAPFPEVFGKEKVNELSKDIGSESTEDQAMEDIKQMEAESISSSEEIVPNSVEKHIQKEDVPSERYLGYLEQLLRLKKYKVPQLEIVPNSAEERLHSMKEGIHAQQKEPMIGVNQELAYFYPELFRQFYQLDAYPSGAWYYVPLGTQYTDAPSFSDIPNPIGSENSEKTTMPLW

SEQ ID NO: 346 - protein, 214 aa, Bos taurus
MKLLILTCLVAVALARPKHPIKHQGLPQEVLNENLLRFFVAPFPEVFGKEKVNELSKDIGSESTEDQAMEDIKQMEAESISSSEEIVPNSVEKHIQKEDVPSERYLGYLEQLLRLKKYKVPQLEIVPNSAEERLHSMKEGIHAQQKEPMIGVNQELAYFYPELFRQFYQLDAYPSGAWYYVPLGTQYTDAPSFSDIPNPIGSENSEKTTMPLWW

SEQ ID NO: 347 - protein, 214 aa, Bos taurus
MKLLILTCLVAVALARPKHPIKHQGLPQEVLNENLLRFFVAPFPEVFGKEKVNELSKDIGSESTEDQAMEDIKEMEAESISSSGEIVPNSVEQKHIQKEDVPSERYLGYLEQLLRLKKYKVPQLEIVPNSAEERLHSMKEGIDAQQKEPMIGVNQELAYFYPELFRQFYQLDAYPSGAWYYVPLGTQYTDAPSFSDIPNPIGSENSEKTTMPLW

SEQ ID NO: 348 - protein, 195 aa, Bos taurus
PIKHQGLPQEVLNENLLRFFVAPFPEVFGKEKVNELSKDIGSESTEDQAMEDIKQMEAESISSSEEIVPNSVEQKHIQKEDVPSERYLGYLEQLLRLKKYKVPQLEIVPNSAEERLHSMKEGIHAQQKEPMIGVNQELAYFYPELFRQFYQLDAYPSGAWYYVPLGTQYTDAPSFSDIPNPIGSENSEKTTMPLW

SEQ ID NO: 349 - protein, 214 aa, Bos taurus
MKLLILTCLVAVALARPKHPIKHQGLPQEVLNENLLRFFVALFPEVFGKEKVNELSKDIGSESTEDQAMEDIKQMEAESISSSEEIVPNSVEQKHIQKEDVPSERYLGYLEQLLRLKKYKVPQLEIVPNSAEERLHSMKEGIDAQQKEPMIGVNQELAYFYPELFRQFYQLDAYPSGAWYYVPLGTQYTDAPSFSDIPNPIGSENSEKTTISLW

SEQ ID NO: 350 - protein, 206 aa, Bos taurus
MKLLILTCLVAVALARPKHPIKHQGLPQEVLNENLLRFFVAPFPEVFGKEKVNELSKDIGSESTEDQAMEDIKQMEAESISSSEQKHIQKEDVPSERYLGYLEQLLRLKKYKVPQLEIVPNSAEERLHSMKEGIHAQQKEPMIGVNQELAYFYPELFRQFYQLDAYPSGAWYYVPLGTQYTDAPSFSDIPNPIGSENSEKTTMPLW

SEQ ID NO: 351 - protein, 206 aa, Bos taurus
MKLLILTCLVAVALARPKHPIKHQGLPQEVLNENLLRFFVAPFPEVFGKEKVNELSKDIGSESTEDQAMEDIKQMEAESISSSEEIVPNSVEQKHIQKEDVPSERYLGYLEQLLRLKKYKVPQLERLHSMKEGIHAQQKEPMIGVNQELAYFYPELFRQFYQLDAYPSGAWYYVPLGTQYTDAPSFSDIPNPIGSENSEKTTMPLW

SEQ ID NO: 352 - protein, 207 aa, Bos taurus
MKLLILTCLVAVALARPKHPIKHQGLPQEVLNENLLRFFVAPFPEVFGKEKVNELSKDIGSESTEDQAMEDIKQMEAESISSSEQKHIQKEDVPSERYLGYLEQLLRLKKYKVPQLEIVPNSAEERLHSMKEGIHAQQKEPMIGVNQELAYFYPELFRQFYQLDAYPSGAWYYVPLGTQYTDAPSFSDIPNPIGSENSEKTTMPLWW

SEQ ID NO: 353 - protein, 206 aa, Bos taurus
MKLLILTCLVAVALARPKHPIKHQGLPQEVLNENLLRFFVAPFPEVFGKEKVNELSKDIGSESTEDQAMEDIKQMEAESISSSEEIVPNSVEQKHIQKEDVPSERYLGYLEQLLRLKKYKVPQLEIVPNSAEERLHSMKEGIHAQQKEPMIGVNQLFRQFYQLDAYPSGAWYYVPLGTQYTDAPSFSDIPNPIGSENSEKTTMPLW

SEQ ID NO: 354 - protein, 205 aa, Bos taurus
MKLLILTCLVAVALARPKHPIKHQGLPQEVLNENLLRFFVAPFPEVFGKEKVNELSKDIGSESTEDQAMEDIKQMEAESISSSEEIVPNSVEKHIQKEDVPSERYLGYLEQLLRLKKYKVPQLERLHSMKEGIHAQQKEPMIGVNQELAYFYPELFRQFYQLDAYPSGAWYYVPLGTQYTDAPSFSDIPNPIGSENSEKTTMPLW

SEQ ID NO: 355 - protein, 201 aa, Bos taurus
MKLLILTCLVAVALARPKHPIKHQGLPQPFPEVFGKEKVNELSKDIGSESTEDQAMEDIKQMEAESISSSEEIVPNSVEQKHIQKEDVPSERYLGYLEQLLRLKKYKVPQLEIVPNSAEERLHSMKEGIHAQQKEPMIGVNQELAYFYPELFRQFYQLDAYPSGAWYYVPLGTQYTDAPSFSDIPNPIGSENSEKTTMPLW

SEQ ID NO: 356 - protein, 202 aa, Bos taurus
MKLLILTCLVAVALARPKHPIKHQGLPQPFPEVFGKEKVNELSKDIGSESTEDQAMEDIKQMEAESISSSEEIVPNSVEQKHIQKEDVPSERYLGYLEQLLRLKKYKVPQLEIVPNSAEERLHSMKEGIHAQQKEPMIGVNQELAYFYPELFRQFYQLDAYPSGAWYYVPLGTQYTDAPSFSDIPNPIGSENSEKTTMPLWW

SEQ ID NO: 357 - protein, 200 aa, Bos taurus
MKLLILTCLVAVALARPKHPIKHQGLPQEVLNENLLRFFVAPFPEVFGKEKVNELSKDIGSESTEDQAMEDIKQMEAESISSSEEIVPNSVEQKHIQKEDVPSERYLGYLEIVPNSAEERLHSMKEGIHAQQKEPMIGVNQELAYFYPELFRQFYQLDAYPSGAWYYVPLGTQYTDAPSFSDIPNPIGSENSEKTTMPLW

SEQ ID NO: 358 - protein, 201 aa, Bos taurus
MKLLILTCLVAVALARPKHPIKHQGLPQEVLNENLLRFFVAPFPEVFGKEKVNELSKDIGSESTEDQAMEDIKQMEAESISSSEEIVPNSVEQKHIQKEDVPSERYLGYLEIVPNSAEERLHSMKEGIHAQQKEPMIGVNQELAYFYPELFRQFYQLDAYPSGAWYYVPLGTQYTDAPSFSDIPNPIGSENSEKTTMPLWW

SEQ ID NO: 359 - protein, 200 aa, Bos taurus
MKLLILTCLVAVALARPKHPIKHQGLPQPFPEVFGKEKVNELSKDIGSESTEDQAMEDIKQMEAESISSSEEIVPNSVEKHIQKEDVPSERYLGYLEQLLRLKKYKVPQLEIVPNSAEERLHSMKEGIHAQQKEPMIGVNQELAYFYPELFRQFYQLDAYPSGAWYYVPLGTQYTDAPSFSDIPNPIGSENSEKTTMPLW

SEQ ID NO: 360 - protein, 199 aa, Bos taurus
MKLLILTCLVAVALARPKHPIKHQGLPQEVLNENLLRFFVAPFPEVFGKEKVNELSKDIGSESTEDQAMEDIKQMEAESISSSEEIVPNSVEKHIQKEDVPSERYLGYLEIVPNSAEERLHSMKEGIHAQQKEPMIGVNQELAYFYPELFRQFYQLDAYPSGAWYYVPLGTQYTDAPSFSDIPNPIGSENSEKTTMPLW

SEQ ID NO: 361 - protein, 200 aa, Bos taurus
MKLLILTCLVAVALARPKHPIKHQGLPQEVLNENLLRFFVAPFPEVFGKEKVNELSKDIGSESTEDQAMEDIKQMEAESISSSEEIVPNSVEKHIQKEDVPSERYLGYLEIVPNSAEERLHSMKEGIHAQQKEPMIGVNQELAYFYPELFRQFYQLDAYPSGAWYYVPLGTQYTDAPSFSDIPNPIGSENSEKTTMPLWW

SEQ ID NO: 362 - protein, 198 aa, Bos taurus
MKLLILTCLVAVALARPKHPIKHQGLPQEVLNENLLRFFVAPFPEVFGKEKVNELSKDIGSESTEDQAMEDIKQMEAESISSSEQKHIQKEDVPSERYLGYLEQLLRLKKYKVPQLERLHSMKEGIHAQQKEPMIGVNQELAYFYPELFRQFYQLDAYPSGAWYYVPLGTQYTDAPSFSDIPNPIGSENSEKTTMPLW

SEQ ID NO: 363 - protein, 198 aa, Bos taurus
MKLLILTCLVAVALARPKHPIKHQGLPQEVLNENLLRFFVAPFPEVFGKEKVNELSKDIGSESTEDQAMEDIKQMEAESISSSEEIVPNSVEQKHIQKEDVPSERYLGYLEQLLRLKKYKVPQLERLHSMKEGIHAQQKEPMIGVNQLFRQFYQLDAYPSGAWYYVPLGTQYTDAPSFSDIPNPIGSENSEKTTMPLW

SEQ ID NO: 364 - protein, 214 aa, Bos taurus
  VARIANT 111..124: note = X can be any naturally occurring amino acid
MKLLILTCLVAVALARPKHPIKHQGLPQEVLNENLLRFFVAPFPEVFGKEKVNELSKDIGSESTEDQAMEDIKQMEAESISSSEEIVPNSVEQKHIQKEDVPSERYLGYLXXXXXXXXXXXXXXEIVPNSAEERLHSMKEGIHAQQKEPMIGVNQELAYFYPELFRQFYQLDAYPSGAWYYVPLGTQYTDAPSFSDIPNPIGSENSEKTTMPLW

SEQ ID NO: 365 - protein, 193 aa, Bos taurus
MKLLILTCLVAVALARPKHPIKHQGLPQPFPEVFGKEKVNELSKDIGSESTEDQAMEDIKQMEAESISSSEEIVPNSVEQKHIQKEDVPSERYLGYLEQLLRLKKYKVPQLERLHSMKEGIHAQQKEPMIGVNQELAYFYPELFRQFYQLDAYPSGAWYYVPLGTQYTDAPSFSDIPNPIGSENSEKTTMPLW

SEQ ID NO: 366 - protein, 194 aa, Bos taurus
MKLLILTCLVAVALARPKHPIKHQGLPQPFPEVFGKEKVNELSKDIGSESTEDQAMEDIKQMEAESISSSEQKHIQKEDVPSERYLGYLEQLLRLKKYKVPQLEIVPNSAEERLHSMKEGIHAQQKEPMIGVNQELAYFYPELFRQFYQLDAYPSGAWYYVPLGTQYTDAPSFSDIPNPIGSENSEKTTMPLWW

SEQ ID NO: 367 - protein, 192 aa, Bos taurus
MKLLILTCLVAVALARPKHPIKHQGLPQEVLNENLLRFFVAPFPEVFGKEKVNELSKDIGSESTEDQAMEDIKQMEAESISSSEQKHIQKEDVPSERYLGYLEIVPNSAEERLHSMKEGIHAQQKEPMIGVNQELAYFYPELFRQFYQLDAYPSGAWYYVPLGTQYTDAPSFSDIPNPIGSENSEKTTMPLW

SEQ ID NO: 368 - protein, 193 aa, Bos taurus
MKLLILTCLVAVALARPKHPIKHQGLPQEVLNENLLRFFVAPFPEVFGKEKVNELSKDIGSESTEDQAMEDIKQMEAESISSSEQKHIQKEDVPSERYLGYLEIVPNSAEERLHSMKEGIHAQQKEPMIGVNQELAYFYPELFRQFYQLDAYPSGAWYYVPLGTQYTDAPSFSDIPNPIGSENSEKTTMPLWW

SEQ ID NO: 369 - protein, 192 aa, Bos taurus
MKLLILTCLVAVALARPKHPIKHQGLPQEVLNENLLRFFVAPFPEVFGKEKVNELSKDIGSESTEDQAMEDIKQMEAESISSSEEIVPNSVEQKHIQKEDVPSERYLGYLEIVPNSAEERLHSMKEGIHAQQKEPMIGVNQLFRQFYQLDAYPSGAWYYVPLGTQYTDAPSFSDIPNPIGSENSEKTTMPLW

SEQ ID NO: 370 - protein, 172 aa, Bos taurus
FSEVFGKEKVNELSKDIGSESTEDQAMEDIKQMEAESISSSEEIVPNSVEQKHIQKEDVPSERYLGYLEQLLRLKKYKVPQLEIVPNSAEERLHSMKEGIHAQQKEPMIGVNQELAYFYPELFRQFYQLDAYPSGAWYYVPLGTQYTDAPSFSDIPNPIGSENSEKTTMPLW

SEQ ID NO: 371 - protein, 187 aa, Bos taurus
MKLLILTCLVAVALARPKHPIKHQGLPQPFPEVFGKEKVNELSKDIGSESTEDQAMEDIKQMEAESISSSEEIVPNSVEQKHIQKEDVPSERYLGYLEIVPNSAEERLHSMKEGIHAQQKEPMIGVNQELAYFYPELFRQFYQLDAYPSGAWYYVPLGTQYTDAPSFSDIPNPIGSENSEKTTMPLW

SEQ ID NO: 372 - protein, 166 aa, Bos taurus
  VARIANT 118: note = X can be any naturally occurring amino acid
KEKVNELSKDIGSESTEDQAMEDIKQMEAESISSSEEIVPNSVEQKHIQKEDVPSERYLGYLEQLLRLKKYKVPQLEIVPNSAEERLHSMKEGIHAQQKEPMIGVNQELAYFYPELFXQFYQLDAYPSGAWYYVPLGTQYTDAPSFSDIPNPIGSENSEKTTMPLW

SEQ ID NO: 373 - protein, 177 aa, Bos taurus
MKLLILTCLVAVALARPKHPIKHQGLPQEVLNENLLRFFVAPFPEVFGKEKVNELSKDIGSESTEDQAMEDIKEQLLRLKKYKVPQLEIVPNSAEERLHSMKEGIHAQQKEPMIGVNQELAYFYPELFRQFYQLDAYPSGAWYYVPLGTQYTDAPSFSDIPNPIGSENSEKTTMPLW

SEQ ID NO: 374 - protein, 178 aa, Bos taurus
MKLLILTCLVAVALARPKHPIKHQGLPQEVLNENLLRFFVAPFPEVFGKEKVNELSKDIGSESTEDQAMEDIKEQLLRLKKYKVPQLEIVPNSAEERLHSMKEGIHAQQKEPMIGVNQELAYFYPELFRQFYQLDAYPSGAWYYVPLGTQYTDAPSFSDIPNPIGSENSEKTTMPLWW

SEQ ID NO: 375 - protein, 155 aa, Bos taurus
GSESTEDQAMEDIKQMEAESISSSEEIVPNSVEQKHIQKEDVPSERYLGYLEQLLRLKKYKVPQLEIVPNSAEERLHSMKEGIHAQQKEPMIGVNQELAYFYPELFRQFYQLDAYPSGAWYYVPLGTQYTDAPSFSDIPNPIGSENSEKTTMPLW

SEQ ID NO: 376 - protein, 163 aa, Bos taurus
MKLLILTCLVAVALARPKHPIKHQGLPQEVLNENLLRFFVAPFPEVFGKEKVNELSKDIGSESTEDQAMEDIKQMEAESISSSEEIVPNSVEQKHIQKEDVPSERYLGYLEQLLRLKKYKVPQLEIVPNSAEERLHSMKEGIHAQQKEPMIGVNQELAYFYPE

SEQ ID NO: 377 - protein, 177 aa, Bos taurus
MKLLILTCLVAVALARPKHPIKHQGLPQEVLNENLLRFFVAPFPEVFGKEKVNELSKDIGSESTEDQAMEDIKQMEAESISSSEEIVPNSVEQKHIQKEDVPSERYLGYLEQLLRLKKYKVPQLEIVPNSAEERLHSMKEGIHAQQKEPMIGVNQELAYFYPEKSQVNSEGLHSYGL

SEQ ID NO: 378 - protein, 141 aa, Bos taurus
QMEAESISSSEEIVPNSVEQKHIQKEDVPSERYLGYLEQLLRLKKYKVPQLEIVPNSAEERLHSMKEGIHAQQKEPMIGVNQELAYFYPELFRQFYQLDAYPSGAWYYVPLGTQYTDAPSFSDIPNPIGSENSEKTTMPLW

SEQ ID NO: 379 - protein, 136 aa, Bos taurus
SISSSEEIVPNSVEQKHIQKEDVPSERYLGYLEQLLRLKKYKVPQLEIVPNSAEERLHSMKEGIHAQQKEPMIGVNQELAYFYPELFRQFYQLDAYPSGAWYYVPLGTQYTDAPSFSDIPNPIGSENSEKTTMPLW

SEQ ID NO: 380 - protein, 138 aa, Bos taurus
  VARIANT 10: note = X can be any naturally occurring amino acid
  VARIANT 90: note = X can be any naturally occurring amino acid
  VARIANT 128: note = X can be any naturally occurring amino acid
AESISSSEEXVPNSVEQKHIQKEDVPSERYLGYLEQLLRLKKYKVPQLEIVPNSAEERLHSMKEGIHAQQKEPMIGVNQELAYFYPELFXQFYQLDAYPSGAWYYVPLGTQYTDAPSFSDIPNPIGSXNSEKTTMPLW

SEQ ID NO: 381 - protein, 126 aa, Bos taurus
NSVEQKHIQKEDVPSERYLGYLEQLLRLKKYKVPQLEIVPNSAEERLHSMKEGIHAQQKEPMIGVNQELAYFYPELFRQFYQLDAYPSGAWYYVPLGTQYTDAPSFSDIPNPIGSENSEKTTMPLW

SEQ ID NO: 382 - protein, 129 aa, Bos taurus
  VARIANT 81: note = X can be any naturally occurring amino acid
IVPNSVEQKHIQKEDVPSERYLGYLEQLLRLKKYKVPQLEIVPNSAEERLHSMKEGIHAQQKEPMIGVNQELAYFYPELFXQFYQPDAYPSGAWYYVPLGTQYTDAPSFSDIPNPIGSENSEKTTMPLW

SEQ ID NO: 383 - protein, 111 aa, Bos taurus
ERYLGYLEQLLRLKKYKVPQLEIVPNSAEERLHSMKEGIHAQQKEPMIGVNQELAYFYPELFRQFYQLDAYPSGAWYYVPLGTQYTDAPSFSDIPNPIGSENSEKTTMPLW

SEQ ID NO: 384 - protein, 103 aa, Bos taurus
QLLRLKKYKVPQLEIVPNSAEERLHSMKEGIHAQQKEPMIGVNQELAYFYPELFRQFYQLDAYPSGAWYYVPLGTQYTDAPSFSDIPNPIGSENSEKTTMPLW

SEQ ID NO: 385 - protein, 214 aa, Capra hircus
MKLLILTCLVAVALARPKHPINHQGLSPEVLNENLLRFVVAPFPEVFRKENINELSKDIGSESTEDQAMEDAKQMKAGSSSSSEEIVPNSAQQKYIQKEDVPSERYLGYLEQLLRLKKYNVPQLEIVPKSAEEQLHSMKEGNPAHQKQPMIAVNQELAYFYPQLFRQFYQLDAYPSGAWYYLPLGTQYTDAPSFSDIPNPIGSENSGKTTMPLW

SEQ ID NO: 386 - protein, 214 aa, Capra hircus
MKLLILTCLVAVALARPKHPINHQGLSPEVLNENLLRFVVAPFPEVFRKENINELSKDIGSESTEDQAMEDAKQMKAGSSSSSEEIVPNSAEQKYIQKEDVPSERYLGYLEQLLKLKKYNVPQLEIVPKSAEEQLHSMKEGNPAHQKQPMIAVNQELAYFYPQLFRQFYQLDAYPSGAWYYLPLGTQYTDAPSFSDIPNPIGSENSGKTAMPLW

SEQ ID NO: 387 - protein, 213 aa, Capra hircus
KLLILTCLVAVALARPKHPINHQGLSPEVPNENLLRFVVAPFPEVFRKENINELSKDIGSESTEDQAMEDAKQMKAGSSSSSEEIVPNSAEQKYIQKEDVPSERYLGYLEQLLRLKKYNVPQLEIVPKSAEEQLHSMKEGNPAHQKQPMIAVNQELAYFYPQLFRQFYQLDAYPSGAWYYLPLGTQYTDAPSFSDIPNPIGSENSGKTTMPLW

SEQ ID NO: 388 - protein, 214 aa, Capra hircus
MKLLILTCLVAVALARPKHPINHRGLSPEVPNENLLRFVVAPFPEVFRKENINELSKDIGSESTEDQAMEDAKQMKAGSSSSSEEIVPNSAEQKYIQKEDVPSERYLGYLEQLLRLKKYNVPQLEIVPKSAEEQLHSMKEGNPAHQKQPMIAVNQELAYFYPQLFRQFYQLDAYPSGAWYYLPLGTQYTDAPSFSDIPNPIGSENSGKTTMPLW

SEQ ID NO: 389 - protein, 213 aa, Capra hircus
MKLLILTCLVAVALARPKHPINHQGLSPEVLNENLLRFVVAPFPEVFRKENINELSKDIGSESTEDQAMEDAKQMKAGSSSSSEEIVPNSAQKYIQKEDVPSERYLGYLEQLLRLKKYNVPQLEIVPKSAEEQLHSMKEGNPAHQKQPMIAVNQELAYFYPQLFRQFYQLDAYPSGAWYYLPLGTQYTDAPSFSDIPNPIGSENSGKTTMPLW

SEQ ID NO: 390 - protein, 213 aa, Capra hircus
MKLLILTCLVVVALARPKHPINHQGLSPEVLNENLLRFVVAPFPEVFRKENINELSKDIGSESTEDQAMEDAKQMKAGSSSSSEEIVPNSAQKYIQKEDVPSERYLGYLEQLLRLKKYNVPQLEIVPKSAEEQLHSMKEGNPAHQKQPMIAVNQELAYFYPQLFRQFYQLDAYPSGAWYYLPLGTQYTDAPSFSDIPNPIGSENSGKTTMPLW

SEQ ID NO: 391 - protein, 214 aa, Capra hircus
MKLLILTCLVAVALARPKHPINHQGLSPEVPNENLLRFVVAPFPEVFRKENINELSKDIGSESTEDQAMEDAKQMKAGSSSSSEEIVPNSAEQKYIQKEDVPSERYLGYLEQLLKLKKYNVPQLEIVPKSAEEQLHSMKEGNPAHQKQPMIAVNQELAYFYPQLFRQFYQLDAYPSGAWYYLPLGTQYTDAPSFSDIPNPIGSENSGKTAMPLW

SEQ ID NO: 392 - protein, 214 aa, Capra hircus
MKLLILTCLVAVALARPKHPINHQGLSPEVPNENLLRFVVAPFPEVFRKENINELSKDIGSESTEDQAMEDAKQMKAGSSSSSEEIVPNSAEQKYIQKEDVPSERYLGYLEQLLKLKKYNVPQLEIVPKSAEEQLHSMKEGNPAHQKQPMIAVNQELAYFYPQLFRQFYQLDAYPSGAWYYLPLGTQYTDAPSFSDIPNPIGSENSGKAAMPLW

SEQ ID NO: 393 - protein, 213 aa, Capra hircus
MKLLILTCLVAVALARPKHPINHQGLSPEVPNENLLRFVVAPFPEVFRKENINELSKDIGSESTEDQAMEDAKQMKAGSSSSSEEIVPNSAEKYIQKEDVPSERYLGYLEQLLRLKKYNVPQLETVPNSAEEQLHSMKEGNPAHQKQPMIAVNQELAYFYPQLFRQFYQLDAYPSGAWYYLPLGTQYTDAPSFSDIPNPIGSENSGKTTMPLW

SEQ ID NO: 394 - protein, 212 aa, Capra hircus
KLLILTCLVAVALARPKHPINHQGLSPEVPNENLLRFVVAPFPEVFRKENINELSKDIGSESTEDQAMEDAKQMKAGSSSSSEEIVPNSAEKYIQKEDVPSERYLGYLEQLLRLKKYNVPQLEIVPKSAEEQLHSMKEGNPAHQKQPMIAVNQELAYFYPQLFRQFYQLDAYPSGAWYYLPLGTQYTDAPSFSDIPNPIGSENSGKTTMPLW

SEQ ID NO: 395 - protein, 214 aa, Capra hircus
MKLLILTCLVAVALARPKHPINIQGLSPEVPNENLLRFVVAPFPEVFRKENINELSKDIGSESTEDQAMEDAKQMKAGSSSSSEEIVPNSAEQKYIQKEDVPSERYLGYLEQLLKLKKYNVPQLEIVPKSAEEQLHSMKEGNPAHQKQPMIAVNQELAYFYPQLFRQFYQLDAYPSGAWYYLPLGTQYTDAPSFSDIPNPIGSENSGKTAMPLW

SEQ ID NO: 396 - protein, 215 aa, Capra hircus
MKLLILTCLVAVALARPKHPINHQGLSPVSEVLNENLLRFVVAPFPEVFRRENINELSKDIGSESTEDQAMEDAKQMKAGSSSSSEEIVPNSAQKYIQKEGVPSERYLGYLEQLLRLKKYNVPQLEIVPKSAEEQLHSMKEGNPAHQKQPMIAVNQELAYFYPQLFRQFYQLDAYPSGAWYYLPLGTQYTDAPSFSDIPNPIGSENSGKTTMPLW

SEQ ID NO: 397 - protein, 213 aa, Capra hircus
MKLLILTCLVAVALARPKHPINIQGLSPEVPNENLLRFVVAPFPEVFRKENINELSKDIGSESTEDQAMEDAKQMKAGSSSSSEEIVPNSAEKYIQKEDVPSERYLGYLEQLLKLKKYNVPQLEIVPKSAEEQLHSMKEGNPAHQKQPMIAVNQELAYFYPQLFRQFYQLDAYPSGAWYYLPLGTQYTDAPSFSDIPNPIGSENSGKTAMPLW

SEQ ID NO: 398 - protein, 206 aa, Capra hircus
MKLLILTCLVAVALARPKHPINHQGLSPEVLNENLLRFVVAPFPEVFRKENINELSKDIGSESTEDQAMEDAKQMKAGSSSSSEEIVPNSAQQKYIQKEDVPSERYLGYLEQLLRLKKYNVPQLEQLHSMKEGNPAHQKQPMIAVNQELAYFYPQLFRQFYQLDAYPSGAWYYLPLGTQYTDAPSFSDIPNPIGSENSGKTTMPLW

SEQ ID NO: 399 - protein, 203 aa, Capra hircus
MKLLILTCLVAVALARPEVLNENLLRFVVAPFPEVFRKENINELSKDIGSESTEDQAMEDAKQMKAGSSSSSEEIVPNSAQQKYIQKEDVPSERYLGYLEQLLRLKKYNVPQLEIVPKSAEEQLHSMKEGNPAHQKQPMIAVNQELAYFYPQLFRQFYQLDAYPSGAWYYLPLGTQYTDAPSFSDIPNPIGSENSGKTTMPLW

SEQ ID NO: 400 - protein, 206 aa, Capra hircus
MKLLILTCLVAVALARPKHPINHQGLSPEVLNENLLRFVVAPFPEVFRKENINELSKDIGSESTEDQAMEDAKQMKAGSSSSSEEIVPNSAQQKYIQKEDVPSERYLGYLEQLLRLKKYNVPQLEIVPKSAEEQLHSMKEGNPAHQKQPMIAVNQLFRQFYQLDAYPSGAWYYLPLGTQYTDAPSFSDIPNPIGSENSGKTTMPLW

SEQ ID NO: 401 - protein, 198 aa, Capra hircus
MKLLILTCLVAVALARPKHPINHQGLSPEVLNENLLRFVVAPFPEVFRKENINELSKDIGSESTEDQAMEDAKQMKAGSSSSSEEIVPNSAQQKYIQKEDVPSERYLGYLEQLLRLKKYNVPQLEQLHSMKEGNPAHQKQPMIAVNQLFRQFYQLDAYPSGAWYYLPLGTQYTDAPSFSDIPNPIGSENSGKTTMPLW

SEQ ID NO: 402 - protein, 177 aa, Capra hircus
MKLLILTCLVAVALARPKHPINHQGLSPEVLNENLLRFVVAPFPEVFRKENINELSKDIGSESTEDQAMEDAKEQLLRLKKYNVPQLEIVPKSAEEQLHSMKEGNPAHQKQPMIAVNQELAYFYPQLFRQFYQLDAYPSGAWYYLPLGTQYTDAPSFSDIPNPIGSENSGKTTMPLW

SEQ ID NO: 403 - protein, 214 aa, Ovis aries
MKLLILTCLVAVALARPKHPIKHQGLSPEVLNENLLRFVVAPFPEVFRKENINELSKDIGSESIEDQAMEDAKQMKAGSSSSSEEIVPNSAEQKYIQKEDVPSERYLGYLEQLLRLKKYNVPQLEIVPKSAEEQLHSMKEGNPAHQKQPMIAVNQELAYFYPQLFRQFYQLDAYPSGAWYYLPLGTQYTDAPSFSDIPNPIGSENSGKTTMPLW

SEQ ID NO: 404 - protein, 214 aa, Ovis aries
MKLLILTCLVAVALARPKHPIKHQGLSSEVLNENLLRFVVAPFPEVFRKENINELSKDIGSESIEDQAMEDAKQMKAGSSSSSEEIVPNSAEQKYIQKEDVPSERYLGYLEQLLRLKKYNVPQLEIVPKSAEEQLHSMKEGNPAHQKQPMIAVNQELAYFYPQLFRQFYQLDAYPSGAWYYLPLGTQYTDAPSFSDIPNPIGSENSGKITMPLW

SEQ ID NO: 405 - protein, 199 aa, Ovis aries; identical to SEQ ID NO: 100

SEQ ID NO: 406 - protein, 214 aa, Ovis aries
MKLLILTCLVAVALARPKHPIKHQGLSPEVLNENLLRFVVAPFPEVFRKENINELSKDIGSESIEDQAMEDAKQMKAGSSSSSEEIVPNSAEQKYIQKEDVPSERYLGYLEQLLRLKKYNVPQLEIVPKSAEEQLHSMKEGNPAHQKQPMIAVNQELAYFYPQLFRQFYQLDAYPSGAWYYLPLGTQYTDAPSFSDIPNPIGSENSGKITMPLW

SEQ ID NO: 407 - protein, 206 aa, Ovis aries
MKLLILTCLVAVALARPKHPIKHQGLSPEVLNENLLRFVVAPFPEVFRKENINELSKDQAMEDAKQMKAGSSSSSEEIVPNSAEQKYIQKEDVPSERYLGYLEQLLRLKKYNVPQLEIVPKSAEEQLHSMKEGNPAHQKQPMIAVNQELAYFYPQLFRQFYQLDAYPSGAWYYLPLGTQYTDAPSFSDIPNPIGSENSGKTTMPLW

SEQ ID NO: 408 - protein, 206 aa, Ovis aries
MKLLILTCLVAVALARPKHPIKHQGLSPEVLNENLLRFVVAPFPEVFRKENINELSKDIGSESIEQMKAGSSSSSEEIVPNSAEQKYIQKEDVPSERYLGYLEQLLRLKKYNVPQLEIVPKSAEEQLHSMKEGNPAHQKQPMIAVNQELAYFYPQLFRQFYQLDAYPSGAWYYLPLGTQYTDAPSFSDIPNPIGSENSGKTTMPLW

SEQ ID NO: 409 - protein, 206 aa, Ovis aries
MKLLILTCLVAVALARPKHPIKHQGLSPEVLNENLLRFVVAPFPEVFRKENINELSKDQAMEDAKQMKAGSSSSSEEIVPNSAEQKYIQKEDVPSERYLGYLEQLLRLKKYNVPQLEIVPKSAEEQLHSMKEGNPAHQKQPMIAVNQELAYFYPQLFRQFYQLDAYPSGAWYYLPLGTQYTDAPSFSDIPNPIGSENSGKITMPLW

SEQ ID NO: 410 - protein, 206 aa, Ovis aries
MKLLILTCLVAVALARPKHPIKHQGLSPEVLNENLLRFVVAPFPEVFRKENINELSKDIGSESIEQMKAGSSSSSEEIVPNSAEQKYIQKEDVPSERYLGYLEQLLRLKKYNVPQLEIVPKSAEEQLHSMKEGNPAHQKQPMIAVNQELAYFYPQLFRQFYQLDAYPSGAWYYLPLGTQYTDAPSFSDIPNPIGSENSGKITMPLW

SEQ ID NO: 411 - protein, 191 aa, Ovis aries
RPKHPIKHQGLSSEVLNENLLRFVVAPFPEVFRKENINELSKDIGSESIEDQAMEDAKQMKAGSSSSSEEIVPNSAEQKYIQKEDVPSERYLGYLEQLLRLKKYNVPQLEIVPKSAEEQLHSMKEGNPAHQKQPMIAVNQLFRQFYQLDAYPSGAWYYLPLGTQYTDAPSFSDIPNPIGSENSGKITMPLW

SEQ ID NO: 412 - protein, 206 aa, Ovis aries
MKLLILTCLVAVALARPKHPIKHQGLSPEVLNENLLRFVVAPFPEVFRKENINELSKDIGSESIEDQAMEDAKQMKAGSSSSSEEIVPNSAEQKYIQKEDVPSERYLGYLEQLLRLKKYNVPQLEIVPKSAEEQLHSMKEGNPAHQKQPMIAVNQLFRQFYQLDAYPSGAWYYLPLGTQYTDAPSFSDIPNPIGSENSGKITMPLW

SEQ ID NO: 413 - protein, 214 aa, Bubalus bubalis
MKLLILTCLVAVALARPKQPIKHQGLPQGVLNENLLRFFVAPFPEVFGKEKVNELSTDIGSESTEDQAMEDIKQMEAESISSSEEIVPISVEQKHIQKEDVPSERYLGYLEQLLRLKKYNVPQLEIVPNLAEEQLHSMKEGIHAQQKEPMIGVNQELAYFYPQLFRQFYQLDAYPSGAWYYVPLGTQYPDAPSFSDIPNPIGSENSEKTTMPLW

SEQ ID NO: 414 - protein, 214 aa, Bubalus bubalis
MKLLVLTCLVAVALARPKQPIKHQGLPQGVLNENLLRFFVAPFPEVFGKEKVNELSTDIGSESTEDQAMEDIKQMEAESISSSEEIVPISVEQKHIQKEDVPSERYLGYLEQLLRLKKYNVPQLEIVPNLAEEQLHSMKEGIHAQQKEPMIGVNQELAYFYPQLFRQFYQLDAYPSGAWYYVPLGTQYPDAPSFSDIPNPIGSENSGKTTMPLW

SEQ ID NO: 415 - protein, 214 aa, Bubalus bubalis
MKLLILTCLVAVALARPKQPIKHQGLPQGVLNENLLRFFVAPFPEVFGKEKVNELSTDIGSESTEDQAMEDIKQMEAESISSSEEIVPISVEQKHIQKEDVPSERYLGYLEQLLRLKKYNVPQLEIVPNLAEEQLHSMKEGIHAQQKEPMIGVNQELAYFYPQLFRQFYQLDAYPSGAWYYVPLGTQYPDAPSFSDIPNPIGSENSGKTTMPLW

SEQ ID NO: 416 - protein, 214 aa, Bubalus bubalis
MKLLILTCLVAVALARPKQPIKHQGLPQGVLNENLLRFFVAPFPEVFGKEKVNELSTDIGSESTEDQAMEDIKQMEAESISSSEEIVPISVEQKHIQKEDVPSERYLGYLEQLLRLKKYNVPQLEIVPNLAEEQLHSMKEGIHAQQKEPMIGVNQELAYFYPQLFRQFYQLDAYPSGAWYYVPLGTQYPDAPLFSDIPNPIGSENSGKTTMPLW

SEQ ID NO: 417 - protein, 214 aa, Bubalus bubalis
MKLLILTCLVAVALARPKQPIKHQGLPQGVLNENLLRFFVAPFPEVFGKEKVNELSTDVGSESTEDQAMEDIKQMEAESISSSEEIVPISVEQKHIQKEDVPSERYLGYLEQLLRLKKYNVPQLEIVPNLAEEQLHSMKEGIHAQQKEPMIGVNQELAYFYPQLFRQFYQLDAYPSGAWYYVPLGTQYPDAPSLSDIPNPIGSENSGKTTMPLW

SEQ ID NO: 418 - protein, 215 aa, Bubalus bubalis
MKLLILTCLVAVALARPKQPIKHQGLPQGVLNENLLRFFVAPFPEVFGKEKVNELSTDIGSESTEDQAMEDIKQMEAESISSSEEIVPISVEQKHIQKEDVPSERYLGYLEQLLRLKKYNVPQLEIVPNLAEEQLHSMKEGIHAQQKEPMIGVNQELAYFYPQLFRQFYQLDAYPSGAWYYVPLGTQYPDAPLFSDIPNPIGSENSGKTTMPLWW

SEQ ID NO: 419 - protein, 214 aa, Bubalus bubalis
MKLLILTCLVAVALARPKQPIKHQGLPQGVLNENLLRFFVAPFPEMFGKEKVNELSTDVGSESTEDQAMEDIKQMEAESISSSEEIVPISVEQKHIQKEDVPSERYLGYLEQLLRLKKYNVPQLEIVPNLAEEQLHSMKEGIHAQQKEPMIGVNQELAYFYPQLFRQFYQLDAYPSGAWYYVPLGTQYPDAPLFSDIPNPIGSENSGKTTMPLW

SEQ ID NO: 420 - protein, 214 aa, Bubalus bubalis
MKLLILTCLVAVALARPKQPIKHQGLPQGVLNENLLRFFVAPFPEVFGKEKVNELSTDIGSESTEDQAMEDIKQMEAESISSSEEIVPISVEKHIQKEDVPSERYLGYLEQLLRLKKYNVPQLEIVPNLAEEQLHSMKEGIHAQQKEPMIGVNQELAYFYPQLFRQFYQLDAYPSGAWYYVPLGTQYPDAPLFSDIPNPIGSENSGKTTMPLWW

SEQ ID NO: 421 - protein, 206 aa, Bubalus bubalis
MKLLILTCLVAVALARPKQPIKHQGLPQGVLNENLLRFFVAPFPEMFGKDVGSESTEDQAMEDIKQMEAESISSSEEIVPISVEQKHIQKEDVPSERYLGYLEQLLRLKKYNVPQLEIVPNLAEEQLHSMKEGIHAQQKEPMIGVNQELAYFYPQLFRQFYQLDAYPSGAWYYVPLGTQYPDAPSFSDIPNPIGSENSGKTTMPLW

SEQ ID NO: 422 - protein, 206 aa, Bubalus bubalis
MKLLILTCLVAVALARPKQPIKHQGLPQGVLNENLLRFFVAPFPEVFGKDIGSESTEDQAMEDIKQMEAESISSSEEIVPISVEQKHIQKEDVPSERYLGYLEQLLRLKKYNVPQLEIVPNLAEEQLHSMKEGIHAQQKEPMIGVNQELAYFYPQLFRQFYQLDAYPSGAWYYVPLGTQYPDAPLFSDIPNPIGSENSGKTTMPLW

SEQ ID NO: 423 - protein, 207 aa, Bubalus bubalis
MKLLILTCLVAVALARPKQPIKHQGLPQGVLNENLLRFFVAPFPEVFGKDIGSESTEDQAMEDIKQMEAESISSSEEIVPISVEQKHIQKEDVPSERYLGYLEQLLRLKKYNVPQLEIVPNLAEEQLHSMKEGIHAQQKEPMIGVNQELAYFYPQLFRQFYQLDAYPSGAWYYVPLGTQYPDAPLFSDIPNPIGSENSGKTTMPLWW

SEQ ID NO: 424 - protein, 207 aa, Bubalus bubalis
MKLLILTCLVAVALARPKQPIKHQGLPQGVLNENLLRFFVAPFPEVFGKEKVNELSTDIGSESTEDQAMEDIKQMEAESISSSEEIVPISVEQKHIQKEDVPSERYLGYLEQLLRLKKYNVPQLEIVPNLAEEQLHSMKEGIHAQQKEPMIGVNQLFRQFYQLDAYPSGAWYYVPLGTQYPDAPLFSDIPNPIGSENSGKTTMPLWW

SEQ ID NO: 425 - protein, 207 aa, Bubalus bubalis
MKLLILTCLVAVALARPKQPIKHQGLPQGVLNENLLRFFVAPFPEVFGKEKVNELSTDQAMEDIKQMEAESISSSEEIVPISVEQKHIQKEDVPSERYLGYLEQLLRLKKYNVPQLEIVPNLAEEQLHSMKEGIHAQQKEPMIGVNQELAYFYPQLFRQFYQLDAYPSGAWYYVPLGTQYPDAPLFSDIPNPIGSENSGKTTMPLWW

SEQ ID NO: 426 - protein, 206 aa, Bubalus bubalis
MKLLILTCLVAVALARPKQPIKHQGLPQGVLNENLLRFFVAPFPEVFGKEKVNELSTDQAMEDIKQMEAESISSSEEIVPISVEKHIQKEDVPSERYLGYLEQLLRLKKYNVPQLEIVPNLAEEQLHSMKEGIHAQQKEPMIGVNQELAYFYPQLFRQFYQLDAYPSGAWYYVPLGTQYPDAPLFSDIPNPIGSENSGKTTMPLWW

SEQ ID NO: 427 - protein, 202 aa, Bubalus bubalis
MKLLILTCLVAVALARPKQPIKHQGLPQPFPEVFGKEKVNELSTDIGSESTEDQAMEDIKQMEAESISSSEEIVPISVEQKHIQKEDVPSERYLGYLEQLLRLKKYNVPQLEIVPNLAEEQLHSMKEGIHAQQKEPMIGVNQELAYFYPQLFRQFYQLDAYPSGAWYYVPLGTQYPDAPLFSDIPNPIGSENSGKTTMPLWW

SEQ ID NO: 428 - protein, 194 aa, Bubalus bubalis
MKLLILTCLVAVALARPKQPIKHQGLPQPFPEVFGKDIGSESTEDQAMEDIKQMEAESISSSEEIVPISVEQKHIQKEDVPSERYLGYLEQLLRLKKYNVPQLEIVPNLAEEQLHSMKEGIHAQQKEPMIGVNQELAYFYPQLFRQFYQLDAYPSGAWYYVPLGTQYPDAPLFSDIPNPIGSENSGKTTMPLWW

SEQ ID NO: 429 - protein, 194 aa, Bubalus bubalis
MKLLILTCLVAVALARPKQPIKHQGLPQPFPEVFGKEKVNELSTDQAMEDIKQMEAESISSSEEIVPISVEQKHIQKEDVPSERYLGYLEQLLRLKKYNVPQLEIVPNLAEEQLHSMKEGIHAQQKEPMIGVNQELAYFYPQLFRQFYQLDAYPSGAWYYVPLGTQYPDAPLFSDIPNPIGSENSGKTTMPLWW

SEQ ID NO: 430 - protein, 178 aa, Bubalus bubalis
MKLLILTCLVAVALARPKQPIKHQGLPQGVLNENLLRFFVAPFPEVFGKEKVNELSTDIGSESTEDQAMEDIKEQLLRLKKYNVPQLEIVPNLAEEQLHSMKEGIHAQQKEPMIGVNQELAYFYPQLFRQFYQLDAYPSGAWYYVPLGTQYPDAPLFSDIPNPIGSENSGKTTMPLWW

SEQ ID NO: 431 - protein, 214 aa, Bos mutus
MKLLILTCLVAVALARPKHPIKHQGLPQEVLNENLLRFFVAPFPEVFGKEKVNELSKDIGSESTEDQAMEDIKKMEAESISSSEEIVPNSVEQKHIQKEDVPSERYLGYLEQLLRLKKYKVPQLEIVPNSAEERLHSMKEGIHAQQKEPMIGVNQELAYFYPELFRQFYQLDAYPSGAWYYVPLGTQYTDAPSFSDIPNPIGSENSGKTTMPLW

SEQ ID NO: 432 - protein, 214 aa, Bos indicus
  VARIANT 99: note = X can be any naturally occurring amino acid
MKLLILTCLVAVALARPKHPIKHQGLPQEVLNENLLRFFVAPFPEVFGKEKVNELSKDIGSESTEDQAMEDIKQMEAESISSSEEIVPNSVEQKHIQKXDVPSERYLGYLEQLLRLKKYKVPQLEIVPNSAEERLHSMKEGIHAQQKEPMIGVNQELAYFYPELFRQFYQLDAYPSGAWYYVPLGTQYTDAPSFSDIPNPIGSENSGKTTMPLW

SEQ ID NO: 433 - protein, 205 aa, Jeotgalicoccus coquinae
MAVALARPKHPIKHQGLPQEVLNENLLRFFVAPFPEVFGKEKVNELSKDIGSESTEDQAMEDIKQMEAESISSSEEIVPNSVEQKHIQKEDVPSERYLGYLEQLLRLKKYKVPQLEIVPNSAEERLHSMKEGIHAQQKEPMIGVNQELAYFYPELFRQFYQLDAYPSGAWYYVPLGTQYTDAPSFSDIPNPIGSENSEKTTMPLW

SEQ ID NO: 434 - protein, 146 aa, Jeotgalicoccus coquinae
MEDIKQMEAESISSSEEIVPNSVEQKHIQKEDVPSERYLGYLEQLLRLKKYKVPQLEIVPNSAEERLHSMKEGIHAQQKEPMIGVNQELAYFYPELFRQFYQLDAYPSGAWYYVPLGTQYTDAPSFSDIPNPIGSENSEKTTMPLW

SEQ ID NO: 435 - protein, 214 aa, Bison bison
MKLLILTCLVAVALARPKHPIKHQGLPQEVLNENLLRFFVAPFPEVFGKEKVNELSKDIGSESTEDQAMEDIKQMEAESISSSEEIVPNSVEQKHIQKEDVPSERYLGYLEQLLRLKKYKVPQLEIVPNSAEERLHSMKEGIHAQQKEPMIGVNQELAYFYPELFRQFYQLDAYPSGAWYYVPLGTQYTDAPSFSDIPNPIGSENSGKTTMPLW

SEQ ID NO: 436 - protein, 214 aa, Bos grunniens
MRLLILTCLVAVALARPKHPIKHQGLPQEVLNENLLRFFVAPFPEVFGKEKVNELSKDIGSESTEDQAMEDIKQMEAESISSSEEIVPNSVEQKHIQKEDVPSEHYLGYLEQLLRLKKYKVPQLEIVPNSAEERLHSMKEGIHAQQKEPMIGVNQELAYFYPELFRQFYQLDAYPSGAWYYVPLGTQYTDAPSFSDIPNPIGSENSGKTTMPLW

SEQ ID NO: 437 - protein, 214 aa, Jeotgalicoccus aerolatus
MKLLILTCLVAVALARPKHPIKHQGLPQEVLNENLLRFFVAPFPEVFGKEKVNELSKDIGSESTEDQAMEDIKQMEAESISSSEEIVPNSVEQKHIQKEDVPSERYLGYLEQLLRLKKYKVPQLEIVPNSAEERLHSMKEGIHAQQKEPMIGVNQELAYFYPELFRQFYQLDAYPSGAWYYVPLGTQYTDAPSFSDIPNPIGSENSEKTTMPLW

SEQ ID NO: 438 - protein, 196 aa, Jeotgalicoccus aerolatus
LVAVALARPKQPIKHQGLPQGVLNENLLRFFVAPFPEVFGKEKVNELSTDIGSESTEDQAMEDIKQMEAESISSSEEIVPISVEQKHIQKEDVPSERYLGYLEQLLRLKKYNVPQLEIVPNLAEEQLHSMKEGIHAQQKEPMIGVNQELAYFYPQLFRQFYQLDAYPSGAWYYVPLGTQYPDAPSFSDIPNPIGSE

SEQ ID NO: 439 - protein, 229 aa, Muntiacus muntjak
KHPIGHQGLPQEVLNENLLRLFVVPFPEVFGKESINELSKDTESESTEDHAMEDTKQVESGSSSSSEEIVSNIAEQKQVQKEDVPSERYLGYLEQLLKLQKYNLPQLEQKIRSPRELLDYFPPDMKHRFFVLPNYSKYNTELNIFSKELLHSMKEGIHAQQKKPMKGVSQELAYFYPQLFRQFYQLDAYPSGAWYYLPLGIQYTDVPSFSDIPNPIGSENSGKATMPLW

SEQ ID NO: 440 - protein, 229 aa, Muntiacus reevesi
KHPIGHQGLPQEVLNENLLRLFVVPFPEVFGKESISELSKDTESESTEDHAMEDTKQVESGSSSSSEEIVSNIAEQKQVQKEDVPSERYLGYLEQLLKLQKYNLPQLEQKIRSPRELLDYFPPDMKHRFFVLPNYSKYNTELNIFSKELLHSMKEGIHAQQKKPMKGVSQELAYFYPQLFRQFYQLDAYPSGAWYYLPLGIQYTDAPSFSDIPNPIGSENSGKATMPLW

SEQ ID NO: 441 - protein, 222 aa, Bos taurus
MKFFIFTCLLAVALAKNTMEHVSSSEESIISQETYKQEKNMDINPSKENLCSTFCKEVVRNANEEEYSIGSSSEESAEVATEEVKITVDDKHYQKALNEINQFYRKFPQYLQYLYQGPIVLNPWDQVKRNAVPITPTLNREQLSTSEENSKKTVDMESTEVFTKKTKLTEEEKNRLNFLKKISQRYQKFALPQYLKTVYQHQKAMKPWIQPKTKVIPYVRYL

SEQ ID NO: 442 - protein, 213 aa, Bos taurus
MKFFIFTCLLAVALAKNTMEHVSSSEESIISQETYKQEKNMAINPSKENLCSTFCKEVVRNANEEEYSIGSSSEESAEVATEEVKITVDDKHYQKALNEINQFYQKFPQYLQYLYQGPIVLNPWDQVKRNAVPITPTLNREQLSTSEESTEVFTKKTKLTEEEKNRLNFLKKISQRYQKFALPQYLKTVYQHQKAMKPWIQPKTKVIPYVRYL

SEQ ID NO: 443 - protein, 213 aa, Bos taurus
MKFFIFTCLLAVALAKNTMEHVSSSEESIISQETYKQEKNMAINPSKEVVRNANEEEYSIGSSSEESAEVATEEVKITVDDKHYQKALNEINQFYQKFPQYLQYLYQGPIVLNPWDQVKRNAVPITPTLNREQLSTSEENSKKTVDMESTEVFTKKTKLTEEEKNRLNFLKKISQRYQKFALPQYLKTVYQHQKAMKPWIQPKTKVIPYVRYL

SEQ ID NO: 444 - protein, 223 aa, Capra hircus
MKFFIFTCLLAVALAKHKMEHVSSSEEPINILQEIYKQEKNMAIHPRKEKLCTTSCEEVVRNANEEEYSIRSSSEESAEVAPEEIKITVDDKHYQKALNEINQFYQKFPQYLQYPYQGPIVLNPWDQVKRNAGPFTPTVNREQLSTSEENSKKTIDMESTEVFTKKTKLTEEEKNRLNFLKKISQYYQKFAWPQYLKTVDQHQKAMKPWTQPKTNAIPYVRYL

SEQ ID NO: 445 - protein, 223 aa, Capra hircus
MKFFIFTCLLAVALAKHKMEHVSSSEEPINIFQEIYKQEKNMAIHPRKEKLCTTSCEEVVRNANEEEYSIRSSSEESAEVAPEEIKITVDDKHYQKALNEINQFYQKFPQYLQYPYQGPIVLNPWDQVKRNAGPFTPTVNREQLSTSEENSKKTIDMESTEVFTKKTKLTEEEKNRLNFLKKISQYYQKFAWPQYLKTVDQHQKAMKPWTQPKTNAIPYVRYL

SEQ ID NO: 446 - protein, 223 aa, Capra hircus
MKFFIFTCLLAVALAKHKMEHISSSEEPINIFQEIYKQEKNMAIHPRKEKLCTTSCEEVVRNANEEEYSIRSSSEESAEVAPEEIKITVDDKHYQKALNEINQFYQKFPQYLQYPYQGPIVLNPWDQVKRNAGPFTPTVNREQLSTSEENSKKTIDMESTEVFTKKTKLTEEEKNRLNFLKKISQYYQKFAWPQYLKTVDQHQKAMKPWTQPKTNAIPYVRYL

SEQ ID NO: 447 - protein, 223 aa, Capra hircus
MKFFIFTCLLAVALAKHKMEHVSSSEEPINIFQEIYKQEKNMAIHPRKEKLCTTSCEEVVRNANEEEYSIRSSSEESAKVAPEEIKITVDDKHYQKALNEINQFYQKFPQYLQYPYQGPIVLNPWDQVKRNAGPFTPTVNREQLSTSEENSKKTIDMESTEVFTKKTKLTEEEKNRLNFLKKISQYYQKFAWPQYLKTVDQHQKAMKPWTQPKTNAIPYVRYL

SEQ ID NO: 448 - protein, 223 aa, Capra hircus
MKFFIFTCLLAVALAKHKMEHVSSSEEPINIFQEIYKQEKNMAIHPRKEKLCTTSCEEVVRNANEEEYSIRSSSEESAEVAPEEIKITVDDKHYQKALNEINQFYQKFPQYLQYPYQGPIVLNPWDQVKRNAGPFTPTVNREQLSTSEENSKKTIDMESTEVFTKKTKLTEEEKNRLNFLKIISQYYQKFAWPQYLKTVDQHQKAMKPWTQPKTNAIPYVRYL

SEQ ID NO: 449 - protein, 223 aa, Capra hircus
MKFFIFTCLLAVALATHKMEHVSSSEEPINIFQEIYKQEKNMAIHPRKEKLCTTSCEEVVRNANEEEYSIRSSSEESAKVAPEEIKITVDDKHYQKALNEINQFYQKFPQYLQYPYQGPIVLNPWDQVKRNAGPFTPTVNREQLSTSEENSKKTIDMESTEVFTKKTKLTEEEKNRLNFLKKISQYYQKFAWPQYLKTVDQHQKAMKPWTQPKTNAIPYVRYL

SEQ ID NO: 450 - protein, 223 aa, Capra hircus
MKFFIFTCLLAVALAKHKMEHVSSSEEPINIFQEIYKQEKNMAIHPRKEKLCTTSCEEVVRNANEEEYSIRSSSEESAEVAPEEIKITVDDKHYQKALNEINQFYQKFPQYLQYPYQGPIVLNPWDQVKRNAGAFTPTVNREQLSTSEENSKKTIDMESTEVFTKKTKLTEEEKNRLNFLKKISQYYQKFAWPQYLKTVDQHQKAMKPWTQPKTNAIPYVRYL

SEQ ID NO: 451 - protein, 223 aa, Capra hircus
MKFFIFTCLLAVALAKHKMEHVSSSEEPINIFQEIYKQEKNMAIHPRKEKLCTTSCEEVVRNANEEEYSIRSSSEESAEVAPEEIKITVDDKHYQKALNEINQFYQKFPQYLQYPYQGPIVLNPWDQVKRNAGPFTPTVNREQLSTSEENSKKTIDMESTEVFTKKAKLTEEEKNRLNFLKIISQYYQKFAWPQYLKTVEQHQKAMKPWTQPKTNAIPYVRYL

SEQ ID NO: 452 - protein, 222 aa, Capra hircus
MKFFIFTCLLAVALAKHMEHVSSSEEPINIFQEIYKQEKNMAIHPRKEKLCTTSCEEVVRNANEEEYSIRSSSEESAEVAPEEIKITVDDKHYQKALNEINQFYQKFPQYLQYPYQGPIVLNPWDQVKRNAGAFTPTVNREQLSTSEENSKKTIDMESTEVFTKKTKLTEEEKNRLNFLKKISQYYQKFAWPQYLKTVDQHQKAMKPWTQPKTNAIPYVRYL

SEQ ID NO: 453 - protein, 223 aa, Capra hircus
MKFFIFTCLLAVALAKHKMEHVSSSEEPINIFQEIYKQEKNMAIRPRKEKLCTTSCEEVVRNANEEEYSIRSSSEESAEVAPEEIKITVDDKHYQKALNEINQFYQKFPQYLQYPYQGPIVLNPWDQVKRNAGPFTPTVNREQLSTSEENSKKTIDMESTEVFTKKTKLTEEEKNRLNFLKKISQYYQKFAWPQYLKTVDQHQKAMKPRTQPKTNAIPYVRYL

SEQ ID NO: 454 - protein, 223 aa, Capra hircus
MKFFIFTCLLAVALAKHKMEHVSSSEEPINIFQEIYKQEKNMAIHPRKEKLCTTSCEEVVRNANEEEYSIRSSSEESAEVAPEEIKITVDDKHYQKALNEINQFYQKFPQYLQYPYQGPIVLNPWDQVKRNAGPFTPTVNREQLSTSEENSKKTIDMESTEVFTKKTKLTEEEKNRLNFLKIISQYYQKFAWPQYLKTVDQHQKAMKRWTQPKTNAIPYVRYL

SEQ ID NO: 455 - protein, 223 aa, Capra hircus
MKFFIFTCLLAVALAKHKMEHVSSSEEPINIFQEIYKQEKNMAIHPRKEKLCTTSCEEVVRNANEEEYSIRSSSEESAEVAPEEIKITVDDKHYQKALNEINQFYQKFPQYLQYPYQGPIVLNPWDQVKRNAGPFTPTVNREQLSTSEENSKKTIDMESTKVFTKKTKLTEEEKNRLNFLKIISQYYQKFAWPQYLKTVDQHQKAMKRWTQPKTNAIPYVRYL

SEQ ID NO: 456 - protein, 215 aa, Capra hircus
MKFFIFTCLLAVALAKHKMEHVSSSEEPINIFQEIYKQEKNMAIHPRKEKLCTTSCEEVVRNANEEEYSIRSSSEEIKITVDDKHYQKALNEINQFYQKFPQYLQYPYQGPIVLNPWDQVKRNAGPFTPTVNREQLSTSEENSKKTIDMESTEVFTKKTKLTEEEKNRLNFLKKISQYYQKFAWPQYLKTVDQHQKAMKPWTQPKTNAIPYVRYL

SEQ ID NO: 457 - protein, 214 aa, Capra hircus
MKFFIFTCLLAVALAKHEPINIFQEIYKQEKNMAIHPRKEKLCTTSCEEVVRNANEEEYSIRSSSEESAEVAPEEIKITVDDKHYQKALNEINQFYQKFPQYLQYPYQGPIVLNPWDQVKRNAGAFTPTVNREQLSTSEENSKKTIDMESTEVFTKKTKLTEEEKNRLNFLKKISQYYQKFAWPQYLKTVDQHQKAMKPWTQPKTNAIPYVRYL

SEQ ID NO: 458 - protein, 214 aa, Capra hircus
MKFFIFTCLLAVALAKHKMEHVSSSEEPINIFQEIYKQEKNMAIHPRKEVVRNANEEEYSIRSSSEESAEVAPEEIKITVDDKHYQKALNEINQFYQKFPQYLQYPYQGPIVLNPWDQVKRNAGPFTPTVNREQLSTSEENSKKTIDMESTEVFTKKTKLTEEEKNRLNFLKKISQYYQKFAWPQYLKTVDQHQKAMKPWTQPKTNAIPYVRYL

SEQ ID NO: 459 - protein, 214 aa, Capra hircus
MKFFIFTCLLAVALAKHEPINIFQEIYKQEKNMAIHPRKEKLCTTSCEEVVRNANEEEYSIRSSSEESAKVAPEEIKITVDDKHYQKALNEINQFYQKFPQYLQYPYQGPIVLNPWDQVKRNAGPFTPTVNREQLSTSEENSKKTIDMESTEVFTKKTKLTEEEKNRLNFLKKISQYYQKFAWPQYLKTVDQYQKAMKPWTQPKTNAIPYVRYL

SEQ ID NO: 460 - protein, 215 aa, Capra hircus
MKFFIFTCLLAVALAKHKMEHVSSSEEPINIFQEIYKQEKNMAIHPRKEKLCTTSCEEVVRNANEEEYSIRSSSEEIKITVDDKHYQKALNEINQFYQKFPQYLQYPYQGPIVLNPWDQVKRNAGAFTPTVNREQLSTSEENSKKTIDMESTEVFTKKTKLTEEEKNRLNFLKKISQYYQKFAWPQYLKTVDQHQKAMKPWTQPKTNAIPYVRYL

SEQ ID NO: 461 - protein, 214 aa, Capra hircus
MKFFIFTCLLAVALAKHKMEHVSSSEEPINIFQEIYKQEKNMAIHPRKEVVRNANEEEYSIRSSSEESAEVAPEEIKITVDDKHYQKALNEINQFYQKFPQYLQYPYQGPIVLNPWDQVKRNAGPFTPTVNREQLSTSEENSKKTIDMESTEVFTKKTKLTEEEKNRLNFLKIISQYYQKFAWPQYLKTVDQHQKAMKPWTQPKTNAIPYVRYL

SEQ ID NO: 462 - protein, 214 aa, Capra hircus
MKFFIFTCLLAVALAKHKMEHVSSSEEPINIFQEIYKQEKNMAIHPRKEVVRNANEEEYSIRSSSEESAEVAPEEIKITVDDKHYQKALNEINQFYQKFPQYLQYPYQGPIVLNPWDQVKRNAGAFTPTVNREQLSTSEENSKKTIDMESTEVFTKKTKLTEEEKNRLNFLKKISQYYQKFAWPQYLKTVDQHQKAMKPWTQPKTNAIPYVRYL

SEQ ID NO: 463 - protein, 214 aa, Capra hircus
MKFFIFTCLLAVALAKHKMEHVSSSEEPINIFQEIYKQEKNMAIHPRKEVVRNANEEEYSIRSSSEESAKVAPEEIKITVDDKHYQKALNEINQFYQKFLQYLQYPYQGPIVLNPWDQVKRNAGPFTPTVNREQLSTSEENSKKTIDMESTEVFTKKTKLTEEEKNRLNFLKKISQYYQKFAWPQYLKTVDQHQKAMKPWTQPKTNAIPYVRYL

SEQ ID NO: 464 - protein, 214 aa, Capra hircus
MKFFIFTCLLAVALAKHKMEHVSSSEEPINIFQEIYKQEKNMAIHPRKEVVRNANEEEYSIRSSSEESAEVAPKEIKITVDDKHYQKALNEINQFYQKFPQYLQYPYQGPIVLNPWDQVKRNAGPFTPTVNREQLSTSEENSKKTIDMESTEVFTKKTKLTEEEKNRLNFLKIISQYYQKFAWPQYLKTVDQHQKAMKAWTQPKTNAIPYVRYL

SEQ ID NO: 465 - protein, 214 aa, Capra hircus
MKFFIFTCLLAVALAKHKMEHVSSSEEPINIFQEIYKQEKNMAIHPRKEKLCTTSCEEVVRNANEEEYSIRSSSEESAEVAPEEIKITVDDKHYQKALNEINQFYQKFPQYLQYPYQGPIVLNPWDQVKRNAGPFTPTVNREQLSTSEESTEVFTKKTKLTEEEKNRLNFLKIISRYYQKFAWPQYLKTVDQHQKAMKPWTQPKTNAIPYVRYL

SEQ ID NO: 466 - protein, 205 aa, Capra hircus
MKFFIFTCLLAVALAKHEPINIFQEIYKQEKNMAIHPRKEVVRNANEEEYSIRSSSEESAEVAPEEIKITVDDKHYQKALNEINQFYQKFPQYLQYPYQGPIVLNPWDQVKRNAGAFTPTVNREQLSTSEENSKKTIDMESTEVFTKKTKLTEEEKNRLNFLKKISQYYQKFAWPQYLKTVDQHQKAMKPWTQPKTNAIPYVRYL

SEQ ID NO: 467 - protein, 206 aa, Capra hircus
MKFFIFTCLLAVALAKHKMEHVSSSEEPINIFQEIYKQEKNMAIHPRKEVVRNANEEEYSIRSSSEEIKITVDDKHYQKALNEINQFYQKFPQYLQYPYQGPIVLNPWDQVKRNAGAFTPTVNREQLSTSEENSKKTIDMESTEVFTKKTKLTEEEKNRLNFLKKISQYYQKFAWPQYLKTVDQHQKAMKPWTQPKTNAIPYVRYL

SEQ ID NO: 468 - protein, 223 aa, Ovis aries
MKFFIFTCLLAVALAKHKMEHVSSSEEPINISQEIYKQEKNMAIHPRKEKLCTTSCEEVVRNANEEEYSIRSSSEESAEVAPEEVKITVDDKHYQKALNEINQFYQKFPQYLQYLYQGPIVLNPWDQVKRNAGPFTPTVNREQLSTSEENSKKTIDMESTEVFTKKTKLTEEEKNRLNFLKKISQYYQKFAWPQYLKTVDQHQKAMKPWTQPKTNAIPYVRYL

SEQ ID NO: 469 - protein, 223 aa, Ovis aries
MKFFIFTCLLAVALAKHKMEHVSSSEEPINISQEIYKQEKNMAIHPRKEKLCTTSCEEVVRNADEEEYSIRSSSEESAEVAPEEVKITVDDKHYQKALNEINQFYQKFPQYLQYLYQGPIVLNPWDQVKRNAGPFTPTVNREQLSTSEENSKKTIDMESTEVFTKKTKLTEEEKNRLNFLKKISQYYQKFAWPQYLKTVDQHQKAMKPWTQPKTNAIPYVRYL

SEQ ID NO: 470 - protein, 223 aa, Ovis aries
MKFFIFTCLLAVALAKHKMEHVSSSEEPINISQEIYKQEKNMAIHPRKEKLCTTSCEEVIRNSNEEEYSIRSSSEESAEVAPEEVKITVDDKHYQKALNEINQFYQKFPQYLQYLYQGPIVLNPWDQVKRNAGPFTPTVNREQLSTSEENSKKTIDMESTEVFTKKTKLTEEEKNRLNFLKKISQYYQKFAWPQYLKTVDQHQKAMKPWTQPKTNAIPYVRYL

SEQ ID NO: 471 - protein, 223 aa, Ovis aries
MKFFIFTCLLAVALAKHKMEHVSSSEEPINISQEIYKQEKNMAIHPRKEKLCTTSCEEVVRNANEEEYSIRSSSEESAEVAPEEVKITVDDKHYQKALNEINQFYQKFPQYLQYLYQGPIVLNPWDQVKRNAGPFTPTVNREQLSTSEENSKKTIDMESTEVFTKKTKLTEEEKNHLNFLKKISQYYQKFAWPQYLKTVDQHQKAMKPWTQPKTNAIPYVRYL

SEQ ID NO: 472 - protein, 223 aa, Ovis aries
MKFFIFTCLLAVALAKHKMEHVSSSEEPINISQEIYKQEKNMAIHPRKEKLCTTSCEEVVSNANEEEYSIRSSSEESAEVAPEEVKITVDDKHYQKALNEINQFYQKFPQYLQYLYQGPIVLNPWDQVKRNAGPFTPTVNREQLSTSEENSKKTIDMESTEVFTKKTKLTEEEKNRLNFLKKISQYYQKFAWPQYLKTVDQHQKAMKPWTQPKTNAIPYVRYL

SEQ ID NO: 473 - protein, 223 aa, Ovis aries
MKFFIFTCLLAVALAKHKMEHVSSSEEPINISQEIYKQEKNMAIHPRKEKLCTTSCEEVVRNANEEEYSIRSSSEESAEVAPEEVKITVYDKHYQKALNEINQFYQKFPQYLQYLYQGPVVLNPWDQVKRNAGPFTPTVNREQLSTSEENSKKTIDMESTEVFTKKTKLTEEEKNRLNFLKKISQYYQKFAWPQYLKTVDQHQKAMKPWTQPKTNAIPYVRYL

SEQ ID NO: 474 - protein, 222 aa, Bubalus bubalis
MKFFIFTCLLAVALAKHTMEHVSSSEESIISQETYKQEKNMAIHPSKENLCSTFCKEVIRNANEEEYSIGSSSEESAEVATEEVKITVDDKHYQKALNEINQFYQKFPQYLQYLYQGPIVLNPWDQVKRNAVPITPTLNREQLSTSEENSKKTVDMESTEVFTKKTKLTEEDKNRLNFLKKISQHYQKFAWPQYLKTVYQYQKAMKPWTQPKTNVIPYVRYL

SEQ ID NO: 475 - protein, 222 aa, Bubalus bubalis
MKFFIFTCLLAVALAKHTMEHVSSSEESIISQETYKQEKNMAIHPSKENLCSTFCKEVIRNANEEEYSIGSSSEESAEVATEEVKITVDDKHYQKALNEINQFYQKFPQYLQYLYQGPIVLNPWDQVKRNAVPITPTLNREQLSTSEENSKKTVDMESTEVITKKTKLTEEDKNRLNFLKKISQHYQKFTWPQYLKTVYQYQKAMKPWTQPKTKVIPYVRYL

SEQ ID NO: 476 - protein, 210 aa, Bubalus bubalis
ALAKHTMEHVSSSEESIISQETYKQEKNMAIHPSKENLCSTFCKEVIRNANEEEYSIGSSSEESAEVATEEVKITVDDKHYQKALNEINQFYQKFPQYLQYLYQGPIVLNPWDQVKRNAVPITPTLNREQLSTSEENSKKTVDMESTEVITKKTKLTEEDKNRLNFLKKISQHYQKFTWPQYLKTVYQYQKAMKPWTQPKTNVIPYVRYL

SEQ ID NO: 477 - protein, 215 aa, Bubalus bubalis
CLLAVALAKHTMEHVSSSEESIISQETYKQEKNMAIHPSKENLCSTFCKEVIRNANEEEYSIGSSSEESAEVATEEVKITVDDKHYQKALNEINQFYQKFPQYLQYLYQGPIVLNPWDQVKRNAVPITPTLNREQLSTSEENSKKTVDMESTEVITKKTKLTEEDKNRLNFLKKISQHYQKFTWPQYLKTVYQYQKAMKPWTQPKTNVIPYVRYL

SEQ ID NO: 478 - protein, 222 aa, Bubalus bubalis
MKFFIFTCLLAVALAKHTMEHVSSSEESIISQETYKQEKNMAIHPSKENLCSTFCKEVIRNANEEEYSIGSSSEESAEVATEEVKITVDDKHYQKALNEINQFYQKFPQYLQYLYQGPIVLNPWDQVKRNAVPITPTLNREQLSTSEENSKKTVDMESTEVITKKTKLTEEDKNRLNFLKKISQHYQKFTWPQYLKTVYQYQKAMKPWTQPKTNVIPYVRYL

SEQ ID NO: 479 - protein, 222 aa, Bubalus bubalis
MKFFIFTCLLAVALAKHTMEHVSSSEESIISQETYKQEKNMAIHPSKENLCSTFCKEVIRNANEEEYSIGSSSEESAEVATEEVKITVDDKHYQKALNEINQFYQKFPQYLQYLYQGPIVLNPWDQVERNAVPITPTLNREQLSTSEENSKKTVDMESTEVITKKTKLTEEDKNRLNFLKKISQHYQKFTWPQYLKTVYQYQKAMKPWTQPKTNVIPYVRYL

SEQ ID NO: 480 - protein, 213 aa, Bubalus bubalis
MKFFIFTCLLAVALAKHTMEHVSSSEESIISQETYKQEKNMAIHPSKENLCSTFCKEYSIGSSSEESAEVATEEVKITVDDKHYQKALNEINQFYQKFPQYLQYLYQGPIVLNPWDQVKRNAVPITPTLNREQLSTSEENSKKTVDMESTEVFTKKTKLTEEDKNRLNFLKKISQHYQKFAWPQYLKTVYQYQKAMKPWTQPKTNVIPYVRYL

SEQ ID NO: 481 - protein, 213 aa, Bubalus bubalis
MKFFIFTCLLAVALAKHTMEHVSSSEESIISQETYKQEKNMAIHPSKENLCSTFCKEVIRNANEEEYSIGSSSEESAEVATEEVKITVDDKHYQKALNEINQFYQKFPQYLQYLYQGPIVLNPWDQVKRNAVPITPTLNREQLSTSEESTEVITKKTKLTEEDKNRLNFLKKISQHYQKFTWPQYLKTVYQYQKAMKPWTQPKTNVIPYVRYL

SEQ ID NO: 482 - protein, 213 aa, Bubalus bubalis
MKFFIFTCLLAVALAKHTMEHVSSSEESIISQETYKQEKNMAIHPSKEVIRNANEEEYSIGSSSEESAEVATEEVKITVDDKHYQKALNEINQFYQKFPQYLQYLYQGPIVLNPWDQVKRNAVPITPTLNREQLSTSEENSKKTVDMESTEVITKKTKLTEEDKNRLNFLKKISQHYQKFTWPQYLKTVYQYQKAMKPWTQPKTNVIPYVRYL

SEQ ID NO: 483 - protein, 222 aa, Bos mutus
MKFFIFTCLLAVALAKNTMEHVSSSEESIISQETYKQEKNMAINPSKGNLCSTFCKEVVRNANEEEYSIGSSSEESAEVATEEVKITVDDKHYQKALNEINQFYQKFPQYLQYLYQGPIVLNPWDQVKRNAVPITPTLNREQLSTSEENSKKTVDMESTEVFTKKTKLTEEEKNRLNFLKKISQRYQKFALPQYLKTVYQHQKAMKPWIQPKTKVIPYVRYL

SEQ ID NO: 484 - protein, 219 aa, Bos mutus
MKFFIFTCLLAVALAKNTMEHVSSSEESIISQETYKQEKNMAINPSKGNLCSTFCKEVVRNANEEEYSIGSSSEESAEVATEEVKITVDDKHYQKALNEINQFYQKFPQYLQYLYQGPIVLNPWDQVKRNAVPITPTLNREQLSTSEENSKKTVDMESTEVFTKKTKLTEEEKNRLNFLKKISQRYQKFALPQYLKTVYQHQKAMKPWIQPKTKVIPYV

SEQ ID NO: 485 - protein, 222 aa, Jeotgalicoccus aerolatus
MKFFIFTCLLAVALAKNTMEHVSSSEESIISQETYKQEKNMAINPSKENLCSTFCKEVVRNANEEEYSIGSSSEESAEVATEEVKITVDDKHYQKALNEINQFYQKFPQYLQYLYQGPIVLNPWDQVKRNAVPITPTLNREQLSTSEENSKKTVDMESTEVFTKKTKLTEEEKNRLNFLKKISQRYQKFALPQYLKTVYQHQKAMKPWIQPKTKVIPYVRYL

SEQ ID NO: 486 - protein, 182 aa, Jeotgalicoccus aerolatus
MAINPSKENLCSTFCKEVVRNANEEEYSIGSSSEESAEVATEEVKITVDDKHYQKALNEINQFYQKFPQYLQYLYQGPIVLNPWDQVKRNAVPITPTLNREQLSTSEENSKKTVDMESTEVFTKKTKLTEEEKNRLNFLKKISQRYQKFALPQYLKTVYQHQKAMKPWIQPKTKVIPYVRYL

SEQ ID NO: 487 - protein, 237 aa, Jeotgalicoccus coquinae
PGLLVFLLGNEDKVNMKFFIFTCLLAVALAKNTMEHVSSSEESIISQETYKQEKNMAINPSKENLCSTFCKEVVRNANEEEYSIGSSSEESAEVATEEVKITVDDKHYQKALNEINQFYQKFPQYLQYLYQGPIVLNPWDQVKRNAVPITPTLNREQLSTSEENSKKTVDMESTEVFTKKTKLTEEEKNRLNFLKKISQRYQKFALPQYLKTVYQHQKAMKPWIQPKTKVIPYVRYL

SEQ ID NO: 488 - protein, 222 aa, Bos grunniens
MKFFIFTCLLAVALAKNTMEHVSSSEESIISQETYKQEKNMAINPSKENLCSTFCKEVVRNANEEEYSIGSSSEESAVVATEEVKITVDDKHYQKALNEINQFYQKFPQYLQYLYQGPIVLNPWDQVKRNAVPITPTLNREQLSTSEENSKKTVDMESTEVFTKKTKLTEEEKNRLNFLKKISQRYQKFALPQYLKTVYQHQKAMEPWIQPKTKVIPYVRYL

SEQ ID NO: 489 - protein, 222 aa, Bison bison
MKFFIFTCLLAVALAKNTMEHVSSSEESIISQETYKQEKNMAINPSKENLCSTFCKEVVRNVNEEEYSIGSSSEESAEVATEEVKITVDDKHYQKALNEINQFYQKFPQYLQYLYQGPIVLNPWDQVKRNAVPITPTLNREQLSTSEENSKKTVDMESTEVFTKKTKLTEEEKNRLNFLKKISQRYQKFALPQYLKTVYQRQKAMKPWIQPKTKVIPYVRYL

SEQ ID NO: 490 - protein, 414 aa, unidentified
  REGION 1..414: note = Bos indicus x Bos taurus
MKFFIFTCLLAVALAKNTMEHVSSSEESIISQETYKQEKNMAINPSKENLCSTFCKEVVRNANEEEYSIGSSSEESAEVATEEVKITVDDKHYQKALNEINQFYQKFPQYLQYLYQGPIVLNPWDQVKRNAVPITPTLNREQLSTSEENSKKTVDMESTEVFTKKTKLTEEEKNRLNFLKKISQRYQKFALPQYLKTVYQHQKAMKPWIQPKTKVIPYVDYSDNIGSPYPVNPSASISYPVIPSASIPYPFNPSASISYPVTPSASIPCPVNPSASIPCPMPDRDFTPPVYLTKTNLPNDPAVPSNPLVFTALGAPLYSIAGLPISPFSGQLPPTGVFRLVPVSSRPIGPLYSPNEAAPSANTYIVEILVPPTTPPHTVPDVQPLTITEPDEAEPAADALAAPEPQSSISFDRE

SEQ ID NO: 491 - protein, 222 aa, Odocoileus virginianus
MKFFIFTCLLAVALAKHKMEHVSSSEESINIQETYKQEKNMAIHPSKENLCSTSCKEVVRNANEEEYSISSSSEESAEVATEEVKVTVDDKHYQKILNEISQFYQKFPQYLQYLYQGPIVMNPWEQVKRTAVPFTPTVNREQLSTSEENSEKIVDMESTEVFTKKTKLTEEEKNHLNLLKKISQYYQKFAWPQYLKTVYQYQKAMKPWTQPKTNAIPYVKYL

SEQ ID NO: 492 - protein, 210 aa, Muntiacus muntjak
MKNSAKHHKMEHVSSSEESINIQETYKQEKNMAIHPSKENLCSTSCKEVVRNANEEEYSISSSSEESAEVATEEVKVTVDDKHYQKVLNEISQLYQKFPQYLQYLYQGPIVMNPWEQVKRTAGPFTPTVNRDHLSTSEENSKKIVDMESTEVFTKKTKLTEEEKNRLNFLKKISQYYQKFAWPQYLKTVYQYQKAMKPWTQPKTNAIPYV

SEQ ID NO: 493 - protein, 210 aa, Muntiacus reevesi
MKNSAKHHKMEHVSSSEESINIQETYKQEKNMAIHPSKENLCSTSCKEVVRNANEEEYSISSSSEESAEVATEEAKVTVDDKHYQKVLNEISQLYQKFPQYLQYLYQGPIVMNPWEQVKRTAGPFTPTVNRDHLSTSEENSKKIVDMESTEVFTKKTKLTEEEKNRLNFLKKISQYYQKFAWPQYLKTVYQYQKAMKPWTQPKTNAIPYV

SEQ ID NO: 494 - protein, 235 aa, Cervus elaphus hippelaphus
MKFFIFTCLLAVALAKHKMEHVSSSEESINIQETYKQEKNMAIHPSKEVVRNANEEESADVATEEVKVTVDNKHYQKVLNEISQFYQKFPQYLQYLYQGPIVMNPWEQVKRTAGPFIPTVNRDHLSTSEENSKKIVDMESTEVFTKKTKLTEEEKNRLNFLKKISQYYQKFAWPQYLKTVYQYQKAMKPWTQPKTNAIPYVVELENLSSTVSYLPLSTTSMFGVAHQQDKSQSIS

SEQ ID NO: 495 - protein, 224 aa, Bos taurus
MKVLILACLVALALARELEELNVPGEIVESLSSSEESITRINKKIEKFQSEEQQQTEDELQDKIHPFAQTQSLVYPFPGPIPNSLPQNIPPLTQTPVVVPPFLQPEVMGVSKVKEAMAPKQKEMPFPKYPVEPFTESQSLTLTDVENLHLPLPLLQSWMHQPHQPLPPTVMFPPQSVLSLSQSKVLPVPQKAVPYPQRDMPIQAFLLYQEPVLGPVRGPFPIIV

SEQ ID NO: 496 - protein, 224 aa, Bos taurus
MKVLILACLVALALARELEELNVPGEIVESLSSSEESITRINKKIEKFQSEEQQQTEDELQDKIHPFAQTQSLVYPFPGPIHNSLPQNIPPLTQTPVVVPPFLQPEVMGVSKVKEAMAPKHKEMPFPKYPVEPFTESQSLTLTDVENLHLPLPLLQSWMHQPHQPLPPTVMFPPQSVLSLSQSKVLPVPQKAVPYPQRDMPIQAFLLYQEPVLGPVRGPFPIIV

SEQ ID NO: 497 - protein, 209 aa, Bos taurus
RELEELNVPGEIVESLSSSEESITRINKKIEKFQSEEQQQTEDELQDKIHPFAQTQSLVYPFPGPIHNSLPQNIPPLTQTPVVVPPFLQPEVMGVSKVKEAMAPKHKEMPFPKYPVEPFTESQSLTLTDVENLHLPLPLLQSWMHQPHQPLPPTVMFPPQSVLSLSQSKVLPVPQKAVPYPQRDMPIQAFLLYQEPVLGPVRGPFPIIV

SEQ ID NO: 498 - protein, 224 aa, Bos taurus
MKVLILACLVALALARELEELNVPGEIVESLSSSEESITRINKKIEKFQSEEQQQTEDELQDKIHPFAQTQSLVYPFPGPIPNSLPQNIPPLTQTPVVVPPFLQPEVMGVSKVKGAMAPKHKEMPFPKYPVEPLTESQSLTLTDVENLHLPLPLLQSWMHQPHQPLPPTVMFPPQSVLSLSQSKVLPVPQKAVPYPQRDMPIQAFLLYQEPVLGPVRGPFPIIV

SEQ ID NO: 499 - protein, 224 aa, Bos taurus
MKVLILACLVALALARELEELNVPGEIVESLSSSEESITRINKKIEKFQSEEQQQTEDELQDKIHPFAQTQSLVYPFPGPIHNSLPQNIPPLTQTPVVVPPFLQPEVMGVSKVKEAMAPKHKEMPFPKYPVEPFTERQSLTLTDVENLHLPLPLLQSWMHQPHQPLPPTVMFPPQSVLSLSQSKVLPVPQKAVPYPQRDMPIQAFLLYQEPVLGPVRGPFPIIV

SEQ ID NO: 500 - protein, 259 aa, Bos taurus
MPLNTIYKQPQNQIIIHSAPPSLLVLYFGKKELRAMKVLILACLVALALARELEELNVPGEIVESLSSSEESITRINKKIEKFQSEEQQQTEDELQDKIHPFAQTQSLVYPFPGPIHNSLPQNIPPLTQTPVVVPPFLQPEVMGVSKVKEAMAPKHKEMPFPKYPVEPFTERQSLTLTDVENLHLPLPLLQSWMHQPHQPLPPTVMFPPQSVLSLSQSKVLPVPQKAVPYPQRDMPIQAFLLYQEPVLGPVRGPFPIIV

SEQ ID NO: 501 - protein, 224 aa, Bos taurus
MKVLILACLVALALARELEELNVPGEIVESLSSSEESITRINKKIEKFQSEEQQQTEDELQDKIHPFAQTQSLVYPFPGPIPNSLPQNIPPLTQTPVVVPPFLQPEVLGVSKVKEAMAPKHKEMPFPKYPVEPFTESQSLTLTDVENLHLPPLLLQSWMHQPHQPLPPTVMFPPQSVLSLSQSKVLPVPQKAVPYPQRDMPIQAFLLYQQPVLGPVRGPFPIIV

SEQ ID NO: 502 - protein, 216 aa, Bos taurus
MKVLILACLVALALARELEELNVPGEIVESLSSSEKIEKFQSEEQQQTEDELQDKIHPFAQTQSLVYPFPGPIHNSLPQNIPPLTQTPVVVPPFLQPEVMGVSKVKEAMAPKHKEMPFPKYPVEPFTERQSLTLTDVENLHLPLPLLQSWMHQPHQPLPPTVMFPPQSVLSLSQSKVLPVPQKAVPYPQRDMPIQAFLLYQEPVLGPVRGPFPIIV

SEQ ID NO: 503 - protein, 166 aa, Bos taurus
DELQDKIHPFAQTQSLVYPFPGPIPNSLPQNIPPLTQTPVVVPPFLQPEVMGVSKVKEAMAPKHKEMPFPKYPVEPFTESQSLTLTDVENLHLPLPLLQSWMHQPHQPLPPTVMFPPQSVLSLSQSKVLPVPQKAVPYPQRDMPIQAFLLYQEPALGPVRGPFPII

SEQ ID NO: 504 - protein, 165 aa, Bos taurus
DELQDKIPPLPEQSLVYPFPGPIHNSLPQNIPPLTQTPVVVPPFLQPEVMGVSRVKEAMAPKHKEMPFPKYPVEPFTESQSLTLTDVENLHLPLPLLQSWMHQPHQPLPPTVMFPPQSVLSLSQSKVLPVPQKAVPYPQRDMPIQAFLLYQEPVLGPVRGPFPII

SEQ ID NO: 505 - protein, 149 aa, Bos taurus
DELQDKIHPFAQTQSLVYPFPGPIPNSLPQNIPPLTQTPVVVPPFLQPEVMGVSKVKEAMAPKHKEMPFPKYPVEPFTESQSLTLTDVENLHLPLPLLQSWMHQPHQPLPPTVMFPPQSVLSLSQSKVLPVPQKAVPYPQRDMPIQAFL

SEQ ID NO: 506 - protein, 149 aa, Bos taurus
DELQDKIHPFAQTQSLVYPFPGPIHNSLPQNIPPLTQTPVVVPPFLQPEVMGVSKVKEAMAPKHKEMPFPKYPVEPFTESQSLTLTDVENLHLPLPLLQSWMHQPHQPLPPTVMFPPQSVLSLSQSKVLPVPQKAVPYPQRDMPIQAFL

SEQ ID NO: 507 - protein, 146 aa, Bos taurus
KIHPFAQTQSLVYPFPGPIHNSLPQNIPPLTQTPVVVPPFLQPEVMGVSKVKEAMAPKHKEMPFPKYPVEPFTERQSLTLTDVENLHLPLPLLQSWMHQPHQPLPPTVMFPPQSVLSLSQSKVLPVPQKAVPYPQRDMPIQAFLLV

SEQ ID NO: 508 - protein, 222 aa, Capra hircus
MKVLILACLVALAIAREQEELNVVGETVESLSSSEESITHINKKIEKFQSEEQQQTEDELQDKIHPFAQAQSLVYPFTGPIPNSLPQNILPLTQTPVVVPPFLQPEIMGVPKVKETMVPKHKEMPFPKYPVEPFTESQSLTLTDVEKLHLPLPLVQSWMHQPPQPLSPTVMFPPQSVLSLSQPKVLPVPQKAVPQRDMPIQAFLLYQEPVLGPVRGPFPILV

SEQ ID NO: 509 - protein, 222 aa, Capra hircus
MKVLILACLVALAIAREQEELNVVGETVESLSSSEESITHINKKIEKFQSEEQQQTEDELQDKIHPFAQAQSLVYPFTGPIPNSLPQNILPLTQTPVVVPPFLQPEIMGVPKVKETMVPKHKEMPFPKYPVEPFTESQSLTLTDVEKLHLPLPLVQSWMHQPPQPLSPTVMFPPQSVLSLSQPKVLPVPQKVVPQRDMPIQAFLLYQEPVLGPVRGPFPILV

SEQ ID NO: 510 - protein, 222 aa, Capra hircus
MKVLILACLVALALAREQEELNVVGETVESLSSSEESITHINKKIEKFQSEEQQQTEDELQDKIHPFAQAQSLVYPFTGPIPNSLPQNILPLTQTPVVVPPFLQPEIMGVPKVKETMVPKHKEMPFPKYPVEPFTESQSLTLTDVEKLHLPLPLVQSWMHQPPQPLSPTVMFPPQSVLSLSQPKVLPVPQKAVPQRDMPIQAFLLYQEPVLGPVRGPFPILV

SEQ ID NO: 511 - protein, 223 aa, Capra hircus
MKVLILACLVALAIAREQEELNVVGETVESLSSSEESITHINKKIEKFQSEEQQQTEDELQDKIHPFAQAQSLVYPFTGPIPNSLPQNILPLTQTPVVVPPFLQPEIMGVPKVKETMVPKHKEMPFPKYPVEPFTESQSLTLTDVEKLHLPLPLVQSWMHQPPQPLSPTVMFPPQSVLSLSQPKVLPVPQKVVPQRDMPIQAFLLYQEPVLGPVRGPFPILVV

SEQ ID NO: 512 - protein, 257 aa, Capra hircus
MPLNTIYKQPLNQIIIHSASPSLLLLYFGKKESRAMKVLILACLVALAIAREQEELNVVGETVESLSSSEESITHINKKIEKFQSEEQQQTEDELQDKIHPFAQAQSLVYPFTGPIPNSLPQNILPLTQTPVVVPPFLQPEIMGVPKVKETMVPKHKEMPFPKYPVEPFTESQSLTLTDVEKLHLPLPLVQSWMHQPPQPLSPTVMFPPQSVLSLSQPKVLPVPQKVVPQRDMPIQAFLLYQEPVLGPVRGPFPILV

SEQ ID NO: 513 - protein, 222 aa, Capra hircus
MKVLILACLVALAIAREQEELNVVGETVESLSSSEESITHINKKIEKFQSEEQQQTEDELQDKIHPFAQAQSLVYPFTGPIPNSLPQNILPLTQTPVVVPPFLQPEIMGVPKVKETMVPKHKEMPFPKYPVEPFTESQSLTLTDVEKLHLPLPLVQSWMHQPPQPLSPTVMFPPQSVLSLSQPKVLPVPQKVVPQRDMPIQAFLLYQEPVLGPVRGPFPILN

SEQ ID NO: 514 - protein, 257 aa, Capra hircus
MPLNTIYKQPLNQIIIHSASPSLLLLYFGKKESRAMKVLILACLVALAIAREQEELNVVGETVESLSSSEESITHINKKIEKFQSEEQQQTEDELQDKIHPFAQAQSLVYPFTGPIPNSLPQNILPLTQTPVVVPPFLQPEIMGVPKVKETMVPKHKEMPFPKYPVEPFTESQSLTLTDVEKLHLPLPLVQSWMHQPPQPLSPTVMFPPQSVLSLSQPKVLPVPQKVVPQRDMPIQAFLLYQEPVLGPVRGPFPILN

SEQ ID NO: 515 - protein, 222 aa, Capra hircus
MKVLILACLVALDIAREQEELNVVGETVESLSSSEESITHINKKIEKFQSEEQQQTEDELQDKIHPFAQAQSLVYPFTGPIPNSLPQNILPLTQTPVVVPPFLQPEIMGVPKVKETMVPKHKEMPFPKYPVEPFTESQSLTLTDVEKLHLPLPLVQSWMHQPPQPLSPTVMFPPQSVLSLSQPKVLPVPQKVVPQRDMPIQAFLLYQEPVLGPVRGPFPILN

SEQ ID NO: 516 - protein, 160 aa, Capra hircus
DELQDKIHPFAQAQSLVYPFTGPIPNSLPQNILPLTQTPVVVPPFLQPEIMGVPKVKETMVPKHKEMPFPKYPVEPFTESQSLTLTDVEKLHLPLPLVQSWMHQPPQPLSPTVMFPPQSVLSLSQPKVLPVPQKAVPQRDMPIQAFLLYQEPVLGPVRGP

SEQ ID NO: 517 - protein, 188 aa, Capra hircus
MKVLILACLVALALAREQEELNVVGETVESLSSSEESITHINKKIEKFQSEEQQQTEDELQDKIHPFAQAQSLVYPFTGPIPNSLPQNILPLTQTPVVVPPFLQPEIMGVPKVKETMVPKHKEMPFPKYPVEPFTESQSLTLTDVEKLHLPLPLVQSWMHQPPQPLSPTVMFPPQSVLSLSQPKVLPV

SEQ ID NO: 518 - protein, 160 aa, Capra hircus
DELQDKIHPFAQAQSLVYPFTGPIPNSLPQNILPLTQTPVVVPPFLQPEIMGVPKVKETMVPKHKEMPFPKYPVEPFTESQSLTLTDVEKLHLPLPLVQSWMHQPPQPLSPTVMFPPQSVLSLSQPKVLPVPQKVVPQRDMPIQAFLLYQEPVLGPVRGP

SEQ ID NO: 519 - protein, 181 aa, Capra hircus
MKVLILACLVALAIAREQEELNVVGETVESLSSSEESITHINKKIEKFQSEEQQQTEDELQDKIHPFAQAQSLVYPFTGPIPNSLPQNILPLTQTPVVVPPFLQPEIMGVPKVKETMVPKHKEMPFPKYPVEPFTESQSLTLTDVEKLHLPLPLVQSWMHQPPQPLSPTVMFPPQSVLSLS

SEQ ID NO: 520 - protein, 149 aa, Capra hircus
QAQSLVYPFTGPIPNSLPQNILPLTQTPVVVPPFLQPEIMGVPKVKETMVPKHKEMPFPKYPVEPFTESQSLTLTDVEKLHLPLPLVQSWMHQPPQPLSPTVMFPPQSVLSLSQPKVLPVPQKAVPQRDMPIQAFLLYQEPVLGPVRGP

SEQ ID NO: 521 - protein, 148 aa, Capra hircus
DEVQDKIHPFAQAQSLVYPFTGPIPNSLPQNILPLTQTPVVVPPFLQPEIMGVPKVKETMVPKHKEMPFPKYPVEPFTESQSLTLTDVEKLHLPLPLVQSWMHQPPQPLSPTVMFPPQSVLSLSQPKVLPVPQKAVPQRDMPIQAFLL

SEQ ID NO: 522 - protein, 222 aa, Ovis aries
MKVLILACLVALALAREQEELNVVGETVESLSSSEESITHINKKIEKFQSEEQQQTEDELQDKIHPFAQAQSLVYPFTGPIPNSLPQNILPLTQTPVVVPPFLQPEIMGVPKVKETMVPKHKEMPFPKYPVEPFTESQSLTLTDVEKLHLPLPLVQSWMHQPPQPLPPTVMFPPQSVLSLSQPKVLPVPQKAVPQRDMPIQAFLLYQEPVLGPVRGPFPILV

SEQ ID NO: 523 - protein, 222 aa, Ovis aries
  VARIANT 7: note = X can be any naturally occurring amino acid
MKVLILXCLVALALAREQEELNVVGETVESLSSSEESITHINKKIEKFQSEEQQQTEDELQDKIHPFAQAQSLVYPFTGPIPNSLPQNILPLTQTPVVVPPFLQPEIMGVPKVKETMVPKHKEMPFPKYPVEPFTESQSLTLTDVEKLHLPLPLVQSWMHQPPQPLPPTVMFPPQSVLSLSQPKVLPVPQKAVPQRDMPIQAFLLYQEPVLGPVRGPFPILV

SEQ ID NO: 524 - protein, 224 aa, Bubalus bubalis
MKVLILACLVALALARELEELNVPGEIVESLSSSEESITHINKKIEKFQSEEQQQTEDELQDKIHPFAQTQSLVYPFPGPIPNSLPQNIPPLTQTPVVVPPFLQPEIMGVSKVKEAMAPKHKEMPFPKYPVEPFTESQSLTLTDVENLHLPLPLLQSWMHQPPQPLPPTVMFPPQSVLSLSQSKVLPVPQKAVPYPQRDMPIQAFLLYQEPVLGPVRGPFPIIV

SEQ ID NO: 525 - protein, 259 aa, Bubalus bubalis
MPLNTIYKQPQNQIIIHSAPPSLLVLYFGKKKLRVMKVLILACLVALALARELEELNVPGEIVESLSSSEESITHINKKIEKFQSEEQQQTEDELQDKIHPFAQTQSLVYPFPGPIPNSLPQNIPPLTQTPVVVPPFLQPEIMGVSKVKEAMAPKHKEMPFPKYPVEPFTESQSLTLTDVENLHLPLPLLQSWMHQPPQPLPPTVMFPPQSVLSLSQSKVLPVPQKAVPYPQRDMPIQAFLLYQEPVLGPVRGPFPIIV

SEQ ID NO: 526 - protein, 224 aa, Bubalus bubalis
MKVLILACLVALALARELEELNVPGEIVESLSSSEESITHINKKIEKFQSEEQQQTEDELQDKIHPFAQTQSLVYPFPGPIPNSLPQNIPPLTQTPVVVPPFLQPEIMGVSKVKEAMAPKHKEMPFPKYPFEPFTESQSLTLTDVENLHLPLPLLQSWMHQPPQPLPPTVMFPPQSVLSLSQSKVLPVPQKAVPYPQRDMPIQAFLLYQEPVLGPVRGPFPIIV

SEQ ID NO: 527 - protein, 224 aa, Bubalus bubalis
MKVLILACLVALALARELEELNVPSEIVESLSSSEESITHINKKIEKFQSEEQQQTEDELQDKIHPFAQTQSLVYPFPGPIPNSLPQNIPPLTQTPVVVPPFLQPEIMGVSKVKEAMAPKHKEMPFPKYPVEPFTESQSLTLTDVENLHLPLPLLQSWMHQPPQPLPPTVMFPPQSVLSLSQSKVLPVPQKAVPYPQRDMPIQAFLLYQEPVLGPVRGPFPIIV

SEQ ID NO: 528 - protein, 224 aa, Bubalus bubalis
MKVLILACLVALALARELEELNVPSEIVESLSSSEESITHINKKIEKFQSEEQRQTEDELQDKIHPFAQTQSLVYPFPGPIPNSLPQNIPPLTQTPVVVPPFLQPEIMGVSKVKEAMAPKHKEMPFPKYPVEPFTESQSLTLTDVENLHLPLPLLQSWMHQPPQPLPPTVMFPPQSVLSLSQSKVLPVPQKAVPYPQRDMPIQAFLLYQEPVLGPVRGPFPIIV

SEQ ID NO: 529 - protein, 224 aa, Bubalus bubalis
MKVLILACLVALALARELEELNVPGEIVESLSSSEESITHINKKIEKFQSEEQQQMEDELQDKIHPFAQTQSLVYPFPGPIPKSLPQNIPPLTQTPVVVPPFLQPEIMGVSKVKEAMAPKHKEMPFPKYPVEPFTESQSLTLTDVENLHLPLPLLQSWMHQPPQPLPPTVMFPPQSVLSLSQSKVLPVPQKAVPYPQRDMPIQAFLLYQEPVLGPVRGPFPIIV

SEQ ID NO: 530 - protein, 259 aa, Bubalus bubalis
MPLNTIYKQPQNQIIIHSAPPSLLVLYFGKKKLRAMKVLILACLVALALARELEELNVPGEIVESLSSSEESITHINKKIEKFQSEEQQQMEDELQDKIHPFAQTQSLVYPFPGPIPKSLPQNIPPLTQTPVVVPPFLQPEIMGVSKVKEAMAPKHKEMPFPKYPVEPFTESQSLTLTDVENLHLPLPLLQSWMHQPPQPLPPTVMFPPQSVLSLSQSKVLPVPQKAVPYPQRDMPIQAFLLYQEPVLGPVRGPFPIIV

SEQ ID NO: 531 - protein, 224 aa, Bubalus bubalis
MKVLILACLVALALARELEELNVPGEIVESLSSSEESITHINKKIEKFQSEEQQQMEDELQDKIHPFAQTQSLVYPFPGPIPKSLPQNIPPLTQTPVVVPPFLQPEIMGVSKVKEATAPKHKEMPFPKYPVEPFTESQSLTLTDVENLHLPLPLLQSWMHQPPQPLPPTVMFPPQSVLSLSQSKVLPVPQKAVPYPQRDMPIQAFLLYQEPVLGPVRGPFPIIV

SEQ ID NO: 532 - protein, 209 aa, Bubalus bubalis
RELEELNVPGEIVESLSSSEESITHINKKIEKFQSEEQQQTEDELQDKIHPFAQTQSLVYPFPGPIPKSLPQNIPPLTQTPVVVPPFLQPEIMGVSKVKEAMAPKHKEMPFPKYPVQPETESQSLTLTDVENLHLPPLLLQSWMHQPHQPLPPTVMFPPQSVLSLSQSKVLPVPEKAVPYPQRDMPIQAFLLYQEPVLGPVRGPFPIIV

SEQ ID NO: 533 - protein, 166 aa, Bubalus bubalis
DELQDKIHPFAQTQSLVYPFPGPIPNSLPQNIPPLTQTPVVVPPFLQPEIMGVSKVKEAMAPKHKEMPFPKYPVEPFTESQSLTLTDVENLHLPLPLLQSWMHQPPQPLPPTVMFPPQSVLSLSQSKVLPVPQKAVPYPQRDMPIQAFLLYQEPVLGPVRGPFPII

SEQ ID NO: 534 - protein, 166 aa, Bubalus bubalis
DELQDKIHPFAQTQSLVYPFPGPIPKSLPQNIPPLTQTPVVVPPFLQPEIMGVSKVKEAMAPKHKEMPFPKYPVEPFTESQSLTLTDVENLHLPLPLLQSWMHQPPQPLPPTVMFPPQSVLSLSQSKVLPVPQKAVPYPQRDMPIQAFLLYQEPVLGPVRGPFPII

SEQ ID NO: 535 - protein, 166 aa, Bubalus bubalis
DELQDKNHPFAQTQSLVYPFPGPIPKSLPQNIPPLTQTPVVVPPFLQPEIMGVSKVKEAMAPKHKEMPFPKYPVEPFTESQSLTLTDVENLHLPLPLLQSWMHQPPQPLPPTVMFPPQSVLSLSQSKVLPVPQKAVPYPQRDMPIQAFLLYQEPVLGPVRGPFPII

SEQ ID NO: 536 - protein, 165 aa, Bubalus bubalis
DELQDKIPPLPEQSLVYPFPAPIPKSLPQNIPPLTQTPVVVPPFLQPEIMGVSKVKEAMAPKHKEMPFPKYPVEPFTESQSLTLTDVENLHLPLPLLQSWMHQPPQPLPPTVMFPPQSVLSLSQSKVLPVPQKAVPYPQRDMPIQAFLLYQEPVLGPVRGPFPII

SEQ ID NO: 537 - protein, 155 aa, Bubalus bubalis
IHPFAQTQSLVYPFPGPIPNSLPQNIPPLTQTPVVVPPFLQPEIMGVSKVKEAMAPKHKEMPFPKYPVEPFTESQSLTLTDVENLHLPLPLLQSWMHQPPQPLPPTVMFPPQSVLSLSQSKVLPVPQKAVPYPQRDMPIQAFLLYQEPVLGPVRG

SEQ ID NO: 538 - protein, 155 aa, Bubalus bubalis
IHPFAQTQSLVYPFPGPIPKSLPQNIPPLTQTPVVVPPFLQPEIMGVSKVKEAMAPKHKEMPFPKYPVEPFTESQSLTLTDVENLHLPLPLLQSWMHQPPQPLPPTVMFPPQSVLSLSQSKVLPVPQKAVPYPQRDMPIQAFLLYQEPVLGPVRG

SEQ ID NO: 539 - protein, 235 aa, Bos mutus
MKVLILACLVALALARELEELNVPGEIVESLSSSEESITRINKKIEKFQSEEQQQTEDELQDKIHPFAQTQSLVYPFPGPIPNSLPQNIPPLTQTPVVVPPFLQPEVMGVSKVKEAMAPKHKEMPFPKYPVEPFTESQSLTLTDVENLHLPLPLLQSWMHQPHQPLPPTVMFPPQSVLSLSQSKVLPVPQKAVPYPQRDMPIQAFLLYQEPVLGPVRGPFPIIVSLNLLTVLFNF

SEQ ID NO: 540 - protein, 270 aa, Bos mutus
MPLNTIYKQPQNQIIIHSAPPSLLVLYFGKKELRAMKVLILACLVALALARELEELNVPGEIVESLSSSEESITRINKKIEKFQSEEQQQTEDELQDKIHPFAQTQSLVYPFPGPIPNSLPQNIPPLTQTPVVVPPFLQPEVMGVSKVKEAMAPKHKEMPFPKYPVEPFTESQSLTLTDVENLHLPLPLLQSWMHQPHQPLPPTVMFPPQSVLSLSQSKVLPVPQKAVPYPQRDMPIQAFLLYQEPVLGPVRGPFPIIVSLNLLTVLFNF

SEQ ID NO: 541 - protein, 259 aa, Bos mutus
MPLNTIYKQPQNQIIIHSAPPSLLVLYFGKKELRAMKVLILACLVALALARELEELNVPGEIVESLSSSEESITRINKKIEKFQSEEQQQTEDELQDKIHPFAQTQSLVYPFPGPIPNSLPQNIPPLTQTPVVVPPFLQPEVMGVSKVKEAMAPKHKEMPFPKYPVEPFTESQSLTLTDVENLHLPLPLLQSWMHQPHQPLPPTVMFPPQSVLSLSQSKVLPVPQKAVPYPQRDMPIQAFLLYQEPVLGPVRGPFPIIV

SEQ ID NO: 542 - protein, 216 aa, Bos mutus
MKVLILACLVALALARELEELNVPGEIVESLSSSEKIEKFQSEEQQQTEDELQDKIHPFAQTQSLVYPFPGPIPNSLPQNIPPLTQTPVVVPPFLQPEVMGVSKVKEAMAPKHKEMPFPKYPVEPFTESQSLTLTDVENLHLPLPLLQSWMHQPHQPLPPTVMFPPQSVLSLSQSKVLPVPQKAVPYPQRDMPIQAFLLYQEPVLGPVRGPFPIIV

SEQ ID NO: 543 - protein, 227 aa, Bos mutus
MKVLILACLVALALARELEELNVPGEIVESLSSSEKIEKFQSEEQQQTEDELQDKIHPFAQTQSLVYPFPGPIPNSLPQNIPPLTQTPVVVPPFLQPEVMGVSKVKEAMAPKHKEMPFPKYPVEPFTESQSLTLTDVENLHLPLPLLQSWMHQPHQPLPPTVMFPPQSVLSLSQSKVLPVPQKAVPYPQRDMPIQAFLLYQEPVLGPVRGPFPIIVSLNLLTVLFNF

SEQ ID NO: 544 - protein, 224 aa, Bos indicus
  VARIANT 197: note = X can be any naturally occurring amino acid
MKVLILACLVALALARELEELNVPGEIVESLSSSEESITRINKKIEKFQSEEQQQTEDELQDKIHPFAQTQSLVYPFPGPIPNSLPQNIPPLTQTPVVVPPFLQPEVMGVSKVKEAMAPKHKEMPFPKYPVEPFTESQSLTLTDVENLHLPLPLLQSWMHQPHQPLPPTVMFPPQSVLSLSQSKVLPVPQKAVPYPXRDMPIQAFLLYQEPVLGPVRGPFPIIV

SEQ ID NO: 545 - protein, 224 aa, Bos indicus
  VARIANT 197: note = X can be any naturally occurring amino acid
MKVLILACLVALALARELEELNVPGEIVESLSSSEESITRINKKIEKFQSEEQQQTEDELQDKIHPFAQTQSLVYPFPGPIHNSLPQNIPPLTQTPVVVPPFLQPEVMGVSKVKEAMAPKHKEMPFPKYPVEPFTESQSLTLTDVENLHLPLPLLQSWMHQPHQPLPPTVMFPPQSVLSLSQSKVLPVPQKAVPYPXRDMPIQAFLLYQEPVLGPVRGPFPIIV

SEQ ID NO: 546 - protein, 165 aa, Bos indicus
DELQDKIPPLPEQSLVYPFPGPIPNSLPQNIPPLTQTPVVVPPFLQPEVMGVSKVKEAMAPKHKEMPFPKYPVEPFTESQSLTLTDVENLHLPLPLLQSWMHQPHQPLPPTVMFPPQSVLSLSQSKVLPVPQKAVPYPQRDMPIQAFLLYQEPVLGPVRGPFPII

SEQ ID NO: 547 - protein, 155 aa, Bos indicus
IHPFAQTQSLVYPFPGPIPNSLPQNIPPLTQTPVVVPPFLQPEVMGVSKVKEAMAPKHKEMPFPKYPVEPFTESQSLTLTDVENLHLPLPLLQSWMHQPHQPLPPTVMFPPQSVLSLSQSKVLPVPQKAVPYPQRDMPIQAFLLYQEPVLGPVRG

SEQ ID NO: 548 - protein, 152 aa, Bos indicus
QSLVYPFPGPIPNSLPQNIPPLTQTPVVVPPFLQPEVMGVSKVKEAMAPKHKEMPFPKYPVEPFTESQSLTLTDVENLHLPLPLLQSWMHQPHQPLPPTVMFPPQSVLSLSQSKVLPVPQKAVPYPQRDMPIQAFLLYQEPVLGPVRGPFPI

SEQ ID NO: 549 - protein, 154 aa, Bos indicus
LPDQSLVYPFPGPIPNSLPQNIPPLTQTPVVVPPFLQPEVMGVSKVKEAMAPKHKEMPFPKYPVEPFTESQSLTLTDVENLHLPLPLLQSWMHQPHQPLPPTVMFPPQSVLSLSQSKVLPVPQKAVPYPQRDMPIQAFLLYQEPVLGPVRGPFP

SEQ ID NO: 550 - protein, 224 aa, Bison bison
MKVLILACLVALALARELEELNVPGEIVESLSSSEESITRINKKIEKFQSEEQQQTEDELQDKIHPFAQTQSLVYPFPGPIPNSLPQNIPPLTQTPVVVPPFLQPEVMGVSKVKEAMAPKHKEMPFPKYPVEPFTESQSLTLTDVENLHLPLPLLQSWMHQPHQPLPPTVMFPPQSVLSLSQSKVLPVPQKAVPYPQRDMPIQAFLLYQEPVLGPVRGPFPIIV

SEQ ID NO: 551 - protein, 177 aa, Jeotgalicoccus aerolatus
FQSEEQQQTEDELQDKIHPFAQTQSLVYPFPGPIPNSLPQNIPPLTQTPVVVPPFLQPEVMGVSKVKEAMAPKHKEMPFPKYPVEPFTESQSLTLTDVENLHLPLPLLQSWMHQPHQPLPPTVMFPPQSVLSLSQSKVLPVPQKAVPYPQRDMPIQAFLLYQEPVLGPVRGPFPIIV

SEQ ID NO: 552 - protein, 240 aa, Jeotgalicoccus coquinae
PPSLLVLYFGKKELRAMKVLILACLVALALARELEELNVPGEIVESLSSSEESITRINKKIEKFQSEEQQQTEDELQDKIHPFAQTQSLVYPFPGPIPNSLPQNIPPLTQTPVVVPPFLQPEVMGVSKVKEAMAPKHKEMPFPKYPVEPFTESQSLTLTDVENLHLPLPLLQSWMHQPHQPLPPTVMFPPQSVLSLSQSKVLPVPQKAVPYPQRDMPIQAFLLYQEPVLGPVRGPFPIIV

SEQ ID NO: 553 - protein, 224 aa, unidentified
  REGION 1..224: note = Bos indicus x Bos taurus
MKVLILACLVALALARELEELNVPGEIVESLSSSEESITRINKKIEKFQSEEQQQTEDELQEKIHPFAQTQSLVYPFPGPIPNSLPQNIPPLTQTPVVVPPFLQPEVMGVSKVKEAMAPKHKEMPFPKYPVEPFTESQSLTLTDVENLHLPLPLLQSWMHQPHQPLPPTVMFPPQSVLSLSQSKVLPVPQKAVPYPQRDMPIQAFLLYQEPVLGPVRGPFPIIV

SEQ ID NO: 554 - protein, 153 aa, unidentified
  REGION 1..153: note = Bos indicus x Bos taurus
QSLVYPFPGPIPNSLPQNIPPLTQTPVVVPPFLQPEVMGVSKVKEAMAPKHKEMPFPKYPVEPFTESQSLTLTDVENLHLPLPLLQSWMHQPHQPLPPTVMFPPQSVLSLSQSKVLPVPQKAVPYPQRDMPIQAFLLYQEPVLGPVRGPFPIL

SEQ ID NO: 555 - protein, 150 aa, unidentified
  REGION 1..150: note = Bos indicus x Bos taurus
DEVQDKIHPFAQTQSLVYPFPGPIPNSLPQNIPPLTQTPVVVPPFLQPEVMGVSKVKEAMAPKHKEMPFPKYPVEPFTESQSLTLTDVENLHLPLPLLQSWMHQPHQPLPPTVMFPPQSVLSLSQSKVLPVPQKAVPYPQRDMPIQAFLL

SEQ ID NO: 556 - protein, 259 aa, Bos grunniens
MPLNTIYKQPQNQIIIHSAPPSLLVLYFGKKELGAMKVLILACLVALALARELEELNVPGEIVEGLSSSEESITRINKKIEKFQSEEQQQTEDGLQDKIHPFAQTQSLVYPFPGPIPNSLPQNIPPLTQTPVVVPPFLQPEVMGVSKVKEAMAPKHKEMPFPKYPVEPFTESQSLTLTDVENLHLPLPLLQSWMHQPHQPLPPTVMFPPQSVLSLSQSKVLPVPQKAVPYPQRDMPIQAFLLYQEPVLGPVRGPFPIIV

SEQ ID NO: 557 - protein, 166 aa, Bos grunniens
DELQDKIHPFAQTQSLVYPFPGPIPNSLPQNIPPLTQTPVVVPPFLQPEVMGVSKVKEAMAPKHKEMPFPKYPVEPFTESQSLTLTDVENLHLPLPLLQSWMHQPHQPLPPTVMFPPQSVLSLSQSKVLPVPQKAVPYPQRDMPIQAFLLYQEPVLGPVRGPFPII

SEQ ID NO: 558 - protein, 166 aa, Bos grunniens
DELQDKIHPFAQTQSLVYPFPGPIPNSLPQNIPPLTQTPVVVPPFLQPEVMGVSKVKEAMAPKHEEMPFPKYPVEPFTESQSLTLTDVENLHLPLPLLQSWMHQPHQPLPPTVMFPPQSVLSLSQSKVLPVPQKAVPYPQRDMPIQAFLLYQEPVLGPVRGPFPII

SEQ ID NO: 559 - protein, 155 aa, Bos grunniens
QSLVYPFPGPIPNSLPQNIPPLTQTPVVVPPFLQPEVMGVSKVKEAMAPKHKEMPFPKYPVEPFTESQSLTLTDVENLHLPLPLLQSWMHQPHQPLPPTVMFPPQSVLSLSQSKVLPVPQKAVPYPQRDMPIQAFLLYQEPVLGPVRGPFPIFVS

SEQ ID NO: 560 - protein, 224 aa, Neophocaena asiaeorientalis
MKVLILACLLALALAREKEELIVSGETVKSLSSSEESVTHINEKIEKFKHEEQQQTEDERQDRIHHFSQPQPLVYSYTGPIPYPILPKNILPLAQPPVVVPFPQPEIMEVPKAKETILPKHKEMRFPKSPVEPFIESQSLTLTDLENLHLPLPLLQSLMHQPPHRLPPTLMFPPQPLQSLSQSKVLPIPQQVVPYLQRDMPIQTLLLYQEPVLGPIQGLYPVIV

SEQ ID NO: 561 - protein, 258 aa, Odocoileus virginianus
MPLNTIYKQPQNQIIIHSGSPSLLVLYVGKEELRAMKVLILACLVALALAKEEELNVSSEIVESISSSEESITHITKKIEKLQSEGQQQAEDELQDKIHPFAQTQSLVYPFTGPIPYSLPQNFLPLPQTPVMVPPFLQPEIMGVSEVKETMVPKHKEMPFPKYPVEPFAEGQSLTLTEAENLHFPLPLPQSWMHQTPQPLPPAVMFPPQSVLSLSQPKVLSVPQKAVPYPQRDMPIQAFLLYQEPVPGPVRGPFPFIV

SEQ ID NO: 562 - protein, 222 aa, Muntiacus reevesi
MKVLILACLVALALAREEELNVSGERLSSSSKAESITHITKKIEKLQSEGQQQTEAELQDKIHPFAQTQPLVYPFTGPIPYSLPQNFLPLPQTPMVVPPFLQPEIMGVSEVKETMVPKHKEMPFPKYPVEPFAEGQSLTLTDVENLHLPLPVLQPWMHQTPQPLPPTVMFPPQSVLSLSQPKVLSVPQKAVPYPQREMPIQAFLLYQEPVPGPVPGPFPIIV

SEQ ID NO: 563 - protein, 230 aa, Muntiacus muntjak
MKVLILACLVALALAREEELNVSGESRTLLKRLSSSSSSKAESITHITKKIEKLPSEGQQQTEAELQDKIHPFAQTQPLVYPFTGPIPYSLPQNFLPLPQTPMVVPPFLQPEIMGVSEVKETMVPKHKEMPFPKYPVEPFAEGQSLTLTDVENLHLPLPVLQPWMHQTPQPLPPTVMFPPQSVLSLSQPKVLSVPQKAVPYPQREMPIQAFLLYQEPVPGPVPGPFPIIV

SEQ ID NO: 564 - protein, 163 aa, Bos taurus
MLIVTQTMKGLDIQKVAGTWYSLAMAASDISLLDAQSAPLRVYVEELKPTPEGDLEILLQKWENGECAQKKIIAEKTKIPAVFKIDALNENKVLVLDTDYKKYLLFCMENSAEPEQSLACQCLVRTPEVDDEALEKFDKALKALPMHIRLSFNPTQLEEQCHI

SEQ ID NO: 565 - protein, 162 aa, Bos taurus; identical to SEQ ID NO: 10

SEQ ID NO: 566 - protein, 178 aa, Bos taurus
MKCLLLALALTCGAQALIVTQTMKGLDIQKVAGTWYSLAMAASDISLLDAQSAPLRVYVEELKPTPEGDLEILLQKWENGECAQKKIIAEKTKIPAVFKIDALNENKVLVLDTDYKKYLLFCMENSAEPEQSLACQCLVRTPEVDDEALEKFDKALKALPMHIRLSFNPTQLEEQCHI

SEQ ID NO: 567 - protein, 161 aa, Bos taurus
IVTQTMKGLDIQKVAGTWYSLAMAASDISLLDAQSAPLRVYVEELKPTPEGDLEILLQKWENGECAQKKIIAEKTKIPAVFKIDALNENKVLVLDTDYKKYLLFCMENSAEPEQSLACQCLVRTPEVDDEALEKFDKALKALPMHIRLSFNPTQLEEQCHI

SEQ ID NO: 568 - protein, 162 aa, Bos taurus
LIVTQTMKGLDIQKVAGTWYSLAMAASDISLLDAQSAPLRVYVEELKPTPEGDLEILLQKWENGECAQKKIIAEKTKIPAVFKIDALNENKVLVLDTDYKKYLLFCMENSAEPEQSLVCQCLVRTPEVDDEALEKFDKALKALPMHIRLSFNPTQLEEQCHI

SEQ ID NO: 569 - protein, 162 aa, Bos taurus
LIVTQTMKGLDIQKVAGTWYSLAMAASDISLLDAQSAPLRVYVEELKPTPEGDLEFLLQKWENGECAQKKIIAEKTKIPAVFKIDALNENKVLVLDTDYKKYLLFCMENSAEPEQSLACQCLVRTPEVDDEALEKFDKALKALPMHIRLSFNPTQLEEQCHI

SEQ ID NO: 570 - protein, 162 aa, Bos taurus
LIVTQTMKGLDIQKVAGTWYSLAMAASDISLLDAQSAPYRVYVEELKPTPEGDLEILLQKWENGECAQKKIIAEKTKIPAVFKIDALNENKVLVLDTDYKKYLLFCMENSAEPEQSLACQCLVRTPEVDDEALEKFDKALKALPMHIRLSFNPTQLEEQCHI

SEQ ID NO: 571 - protein, 178 aa, Bos taurus
MKCLLLALALTCGAQALIVTQTMKGLDIQKVAGTWYSLAMAASDISLLDAQSAPLRVYVEELKPTPEGDLEILLQKWENGECAQKKIIAEKTKIPAVFKIDALNENKVLVLDTDYKKYLLFCMENSAEPEQSLVCQCLVRTPEVDDEALEKFDKALKALPMHIRLSFNPTQLEEQCHI

SEQ ID NO: 572 - protein, 162 aa, Bos taurus
ASVTQTMKGLDIQKVAGTWYSLAMAASDISLLDAQSAPLRVYVEELKPTPEGDLEILLQKWENGECAQKKIIAEKTKIPAVFKIDALNENKVLVLDTDYKKYLLFCMENSAEPEQSLACQCLVRTPEVDDEALEKFDKALKALPMHIRLSFNPTQLEEQCHI

SEQ ID NO: 573 - protein, 162 aa, Bos taurus
ASVTQTMKGLDIQKVAGTWYSLAMAASDISLLDAQSAPLRVYVEELKPTPEGDLEILFQKWENGECAQKKIIAEKTKIPAVFKIDALNENKVLVLDTDYKKYLLFCMENSAEPEQSLACQCLVRTPEVDDEALEKFDKALKALPMHIRLSFNPTQLEEQCHI

SEQ ID NO: 574 - protein, 162 aa, Bos taurus
ASVTQTMKGLDIQKVAGTWYSLAMAASDISLLDAQSAPLRVYVEELKPTPEGDLEILLQKWENGECAQKKIIAEKTKIPAVFKIDALNENKVLVLDTDYKKYLLFCLENSAEPEQSLACQCLVRTPEVDDEALEKFDKALKALPMHIRLSFNPTQLEEQCHI

SEQ ID NO: 575 - protein, 162 aa, Bos taurus
LIVTQTMKGLDIQKVAGTWYSLAMAASDISLLDAQSAPLRVYVEELKPTPEGDLEILLQKWENDECAQKKIIAEKTKIPAVFKIDALNENKVLVLDTDYKKYLLFCMENSAEPEQSLVCQCLVRTPEVDDEALEKFDKALKALPMHIRLSFNPTQLEEQCHI

SEQ ID NO: 576 - protein, 162 aa, Bos taurus
ASVTQTMKGLDIQKVAGTWYSLAMAASDISLLDAQSAPLRVYVEELKPTPEGDLEILLQKWENGECAQKKIIAEKTKIPAVFKIDALNENKVLVLDTDYKKYLLLCMENSAEPEQSLACQCLVRTPEVDDEALEKFDKALKALPMHIRLSFNPTQLEEQCHI

SEQ ID NO: 577 - protein, 178 aa, Bos taurus
MKCLLLALALTCGAQALIVTQTMKGLDIQKVAGTWYSLAMAASDISLLDAQSAPLRVYVEELKPTPEGDLEILLQKWENDECAQKKIIAEKTKIPAVFKIDALNENKVLVLDTDYKKYLLFCMENSAEPEQSLVCQCLVRTPEVDDEALEKFDKALKALPMHIRLSFNPTQLEEQCHI

SEQ ID NO: 578 - protein, 162 aa, Bos taurus
ASVTQTMKGLDIQKVAGTWYSLAMAASDISLLDAQSAPARVYVEELKPTPEGDLEFLLQKWENGECAQKKIIAEKTKIPAVFKIDALNENKVLVLDTDYKKYLLFCMENSAEPEQSLACQCLVRTPEVDDEALEKFDKALKALPMHIRLSFNPTQLEEQCHI

SEQ ID NO: 579 - protein, 162 aa, Bos taurus
ASVTQTMKGLDIQKVAGTWYSLAMAASDISLLDAQSAPARVYVEELKPTPEGDLEILLQKWENGECAQKKIIAEKTKIPAVFKIDALNENKVLVLDTDYKKYLLLCMENSAEPEQSLACQCLVRTPEVDDEALEKFDKALKALPMHIRLSFNPTQLEEQCHI

SEQ ID NO: 580 - protein, 162 aa, Bos taurus
LIVTQTMKGLDIQKVAGTWYSLAMAASDISLLDAQSAPLRVYVEELKPTPEGDLEILLQKWENDECAQKKIIAEKTKIPAVFKIDALNENKVLVLDTDYKKYLLFCMENSAEPEQSLVCQSLVRTPEVDDEALEKFDKALKALPMHIRLSFNPTQLEEQCHI

SEQ ID NO: 581 - protein, 178 aa, Bos taurus
MKCLLLALALTCGAQALIVTQTMKGLDIQKVAGTWYSLAMAASDISLLDAQSAPLRVYVEELKPTPEGDLEILLQKWENDECAQKKIIAEKTKIPAVFKIDALNENKVLVLDTDYKKYLLVCMENSAEPEQSLVCQCLVRTPEVDDEALEKFDKALKALPMHIRLSFNPTQLEEQCHI

SEQ ID NO: 582 - protein, 163 aa, Bos taurus
AAYVTQTMKGLDIQKVAGTWYSLAMAASDISLLDAQSAPLRVYVEELKPTPEGDLEILLQKWENDECAQKKIIAEKTKIPAVFKIDALNENKVLVLDTDYKKYLLFCMENSAEPEQSLVCQCLVRTPEVDDEALEKFDKALKALPMHIRLSFNPTQLEEQCHI

SEQ ID NO: 583 - protein, 162 aa, Bos taurus
ASVTQTMKGLDIQKVAGTWYSLAMAASDISLLDAQSAPARVYVEELKPTPEGDLEFLLQKWENGECAQKKIIAEKTKIPAVFKIDALNENKVLVLDTDYKKYLLFCFENSAEPEQSLACQCLVRTPEVDDEALEKFDKALKALPMHIRLSFNPTQLEEQCHI

SEQ ID NO: 584 - protein, 162 aa, Bos taurus
ASVTQTMKGLDIQKVAGTWYSLAMAASDISLLDAQSAPARVYVEELKPTPEGDLEILLQKWENGECAQKKIIAEKTKIPAVFKIDALNENKVLVLDTDYKKYLLLCFENSAEPEQSLACQCLVRTPEVDDEALEKFDKALKALPMHIRLSFNPTQLEEQCHI

SEQ ID NO: 585 - protein, 162 aa, Bos taurus
LIVTQTMKGLDIQKVAGTWYSLAMAASDISLLDAQSAPLRVYVEELKPTPEGDLEILLQKWENDECAQKKIIAEKTKIPAVFKLDAINENKVLVLDTDYKKYLLFCMENSAEPEQSLVCQCLVRTPEVDDEALEKFDKALKALPMHIRLSFNPTLQEEQCHI

SEQ ID NO: 586 - protein, 252 aa, Bos taurus
MKCLLLALALTCGAQALIVTQTMKGLDIQKVAGTWYSLAMAASDISLLDAQSAPLRVYVEELKPTPEGDLEILLQKWENGECAQKKIIAEKTKIPAVFKIDALNENKVLVLDTDYKKYLLFCMENSAEPEQSLACQCLVRTPEVDDEALEKFDKALKALPMHIRLSFNPTQLEGEHPGPTLLLGQEATRPRTTSSHGDPQLPRPPGRMETGCRAPRWPPPHPLPSSLCPGVSSPILTLPRHGSPSPTEQCHI

SEQ ID NO: 587 - protein, 151 aa, Bos taurus
IQKVAGTWYSLAMAASDISLLDAQSAPLRVYVEELKPTPEGDLEILLQKWENDECAQKKIIAEKTKIPAVFKIDALNENKVLVLDTDYKKYLLFCMENSAEPEQSLVCQCLVRTPEVDDEALEKFDKALKALPMHIRLSFNPTQLEEQCHI

SEQ ID NO: 588 - protein, 162 aa, Capra hircus
IIVTQTMKGLDIQKVAGTWYSLAMAASDISLLDAQSAPLRVYVEELKPTPEGNLEILLQKWENGECAQKKIIAEKTKIPAVFKIDALNENKVLVLDTDYKKYLLFCMENSAEPEQSLACQCLVRTPEVDKEALEKFDKALKALPMHIRLAFNPTQLEGQCHV

SEQ ID NO: 589 - protein, 180 aa, Capra hircus
MKCLLLALGLALACGIQAIIVTQTMKGLDIQKVAGTWYSLAMAASDISLLDAQSAPLRVYVEELKPTPEGNLEILLQKWENGECAQKKIIAEKTKIPAVFKIDALNENKVLVLDTDYKKYLLFCMENSAEPEQSLACQCLVRTPEVDKEALEKFDKALKALPMHIRLAFNPTQLEGQCHV

SEQ ID NO: 590 - protein, 169 aa, Capra hircus
MKCLLLALGLALACGIQAIIVTQTMKGLDIQKVAGTWYSLAMAASDISLLDAQSAPLRVYVEELKPTPEGNLEILLQKWENGECAQKKIIAEKTKIPAVFKIDALNENKVLVLDTDYKKYLLFCMENSAEPEQSLACQCLVRTPEVDKEALEKFDKALKALPMHIRLAF

SEQ ID NO: 591 - protein, 162 aa, Ovis aries
IIVTQTMKGLDIQKVAGTWYSLAMAASDISLLDAQSAPLRVYVEELKPTPEGNLEILLQKWENGECAQKKIIAEKTKIPAVFKIDALNENKVLVLDTDYKKYLLFCMENSAEPEQSLACQCLVRTPEVDNEALEKFDKALKALPMHIRLAFNPTQLEGQCHV

SEQ ID NO: 592 - protein, 180 aa, Ovis aries
MKCLLLALGLALACGVQAIIVTQTMKGLDIQKVAGTWHSLAMAASDISLLDAQSAPLRVYVEELKPTPEGNLEILLQKWENGECAQKKIIAEKTKIPAVFKIDALNENKVLVLDTDYKKYLLFCMENSAEPEQSLACQCLVRTPEVDNEALEKFDKALKALPMHIRLAFNPTQLEGQCHV

SEQ ID NO: 593 - protein, 161 aa, Ovis aries
VTQTMKGLDIQKVAGTWYHSLAMAASDISLLDAQSAPLRVYVEELKPTPEGNLEILLQKWENGECAQKKIIAEKTKIPAVFKIDALNENKVLVLDTDYKKYLLFCMENSAEPEQSLACQCLVRTPEVDNEALEKFDKALKALPMHIRLAFNPTQLEGQCHV

SEQ ID NO: 594 - protein, 162 aa, Ovis aries
IIVTQTMKGLDIQKVAGTWYHSLAMAASDISLLDAQSAPLRVYVEELKPTPEGNLEILLQKWEGECAQKKIIAEKTKIPAVFKIDALNENKVLVLDTDYKKYLLFCMENSAEPEQSLACQCLVRTPEVDNEALEKFDKALKALPMHIRLAFNPTQLEGQCHV

SEQ ID NO: 595 - protein, 162 aa, Bubalus bubalis
IIVTQTMKGLDIQKVAGTWYSLAMAASDISLLDAQSAPLRVYVEELKPTPEGDLEILLQKWENGECAQKKIIAEKTKIPAVFKIDALNENKVLVLDTDYKKYLLFCMENSAEPEQSLACQCLVRTPEVDDEALEKFDKALKALPMHIRLSFNPTQLEEQCHV

SEQ ID NO: 596 - protein, 180 aa, Bubalus bubalis
MKCLLLALGLALACAAQAIIVTQTMKGLDIQKVAGTWYSLAMAASDISLLDAQSAPLRVYVEELKPTPEGDLEILLQKWENGECAQKKIIAEKTKIPAVFKIDALNENKVLVLDTDYKKYLLFCMENSAEPEQSLACQCLVRTPEVDDEALEKFDKALKALPMHIRLSFNPTQLEEQCHV

SEQ ID NO: 597 - protein, 180 aa, Bubalus bubalis
MKCLLLALGLALACGAQAIIVTQTMKGLDIQKVAGTWYSLAMAASDISLLDAQSAPLRVYVEELKPTPEGDLEILLQKWENGECAQKKIIAEKTKIPAVFKIDALNENKVLVLDTDYKKYLLFCMENSAEPEQSLACQCLVRTPEVDDEALEKFDKALKALPMHIRLSFNPTQLEEQCHV

SEQ ID NO: 598 - protein, 180 aa, Bubalus bubalis
MKCLLLALGLALACGTQAIIVTQTMKGLDIQKVAGTWYSLAMAASDISLLDAQSAPLRVYVEELKPTPEGDLEILLQKWENGECAQKKIIAEKTKIPAVFKIDALNENKVLVLDTDYKKYLLFCMENSAEPEQSLACQCLVRTPEVDDEALEKFDKALKALPMHIRLSFNPTQLEEQCHV

SEQ ID NO: 599 - protein, 180 aa, Bubalus bubalis
MKCLLLALGLALACGTQAIIVTQTMKGLDIQKVAGTWYSLAMAVSDISLLDAQSAPLRVYVEELKPTPEGDLEILLQKWENGECAQKKIIAEKTKIPAVFKIDALNENKVLVLDTDYKKYLLFCMENSAEPEQSLACQCLVRTPEVDDEALEKFDKALKALPMHIRLSFNPTQLEEQCHV

SEQ ID NO: 600 - protein, 178 aa, Bubalus bubalis
MKCLLLALALACGAQAIIVTQTMKGLDIQKVAGTWYSLAMAASDISLLDAQSAPLRVYVEELKPTPEGDLEILLQKWENGECAQKKIIAEKTKIPAVFKIDALNENKVLVLDTDYKKYLLFCMENSAEPEKAWPASAWVRTPEVDDEALEKFDKALKALPMHIRLSFNPTQLEEQCHI

SEQ ID NO: 601 - protein, 178 aa, Bos mutus
MKCLLLALALTCGAQALIVTQTMKGLDIQKVAGTWYSLAMAASDISLLDAQSAPLRVYVEELKPTPEGDLEILLQKWENGECAQKKIIAEKTKIPAVFKIDALNENKVLVLDTDYKKYLLFCMENSAEPEQSLACQCLVRTPEVDDEALEKFDKALKALPMHIRLSFNPTQLEGQCHI

SEQ ID NO: 602 - protein, 298 aa, Bos mutus
MQLKVPPQVAGMWHTVAMAASNMLLLDAESGPLRVYVEELKPTPEGDLEILLQKRENHECVEKTLMAQKTEDPAVFTPGPEMDDEAMEKFAGALASLLEHVQMVLGLRQGAELRSVTPAAAMKCLLLALALTCGAQALIVTQTMKGLDIQKVAGTWYSLAMAASDISLLDAQSAPLRVYVEELKPTPEGDLEILLQKWENGECAQKKIIAEKTKIPAVFKIDALNENKVLVLDTDYKKYLLFCMENSAEPEQSLACQCLVRTPEVDDEALEKFDKALKALPMHIRLSFNPTQLEGKPS

SEQ ID NO: 603 - protein, 178 aa, Bos indicus
  VARIANT 80: note = X can be any naturally occurring amino acid
  VARIANT 134: note = X can be any naturally occurring amino acid
MKCLLLALALTCGAQALIVTQTMKGLDIQKVAGTWYSLAMAASDISLLDAQSAPLRVYVEELKPTPEGDLEILLQKWENXECAQKKIIAEKTKIPAVFKIDALNENKVLVLDTDYKKYLLFCMENSAEPEQSLXCQCLVRTPEVDDEALEKFDKALKALPMHIRLSFNPTQLEEQCHI

SEQ ID NO: 604 - protein, 184 aa, Jeotgalicoccus coquinae
MTPAAAMKCLLLALALTCGAQALIVTQTMKGLDIQKVAGTWYSLAMAASDISLLDAQSAPLRVYVEELKPTPEGDLEILLQKWENGECAQKKIIAEKTKIPAVFKIDALNENKVLVLDTDYKKYLLFCMENSAEPEQSLACQCLVRTPEVDDEALEKFDKALKALPMHIRLSFNPTQLEEQCHI

SEQ ID NO: 605 - protein, 181 aa, Jeotgalicoccus schoeneichii
LRSVIPAAAMKCLLLALALTCGAQALIVTQTMKGLDIQKVAGTWYSLAMAASDISLLDAQSAPLRVYVEELKPTPEGDLEILLQKWENGECAQKKIIAEKTKIPAVFKIDALNENKVLVLDTDYKKYLLFCMENSAEPEQSLACQCLVRTGVQDRCLEREQSPCAGHRLQKVPALLHGEQC

SEQ ID NO: 606 - protein, 178 aa, Bison bison
MKCLLLALALTCGAQALIVTQTMKGLDIQKVAGTWYSLAMAASDISLLDAQSAPLRVYVEELKPTPEGNLEILLQKWENGECAQKKIIAEKTKVPAVFKIDALNENKVLVLDTDYKKYLLFCMENSAEPEQSLACQCLVRTPEVDDEALEKFDKALKALPMHIRLSFNPTQLEGQCHI

SEQ ID NO: 607 - protein, 180 aa, unidentified
  REGION 1..180: note = Ovis sp.
MKCLLLALGLALACGVQAIIVTQTMKGLDIQKVAGTWYSLAMAASDISLLDAQSAPLRVYVEELKPTPEGNLEILLQKWENGECAQKKIIAEKTKIPAVFKIDALNENKVLVLDTDYKKYLLFCMENSAEPEQSLACQCLVRTPEVDNEALEKFDKALKALPMHIRLAFNPTQLEGQCHV

SEQ ID NO: 608 - protein, 162 aa, Ovis aries
IIVTQTMKGLDIQKVAGTWHSLAMAASDISLLDAQSAPLRVYVEELKPTPEGNLEILLQKWENGECAQKKIIAEKTKIPAVFKIDALNENKVLVLDTDYKKYLLFCMENSAEPEQSLACQCLVRTPEVDNEALEKFDKALKALPMHIRLAFNPTQLEGQCHV

SEQ ID NO: 609 - protein, 180 aa, Odocoileus virginianus
MKCLLLALGLALACGVQAAHIPQTAEDLDVRKVVGTWHVVAMAASDMSLLDAESGPLRVYVEELKPTPQGDLEVLLQKRENGKCAQKKIIAEKTEIPAVFKIDALNENKVLVLDTDYKKYLLFCMENSAEPEQSLACQCLVRTPEVDDEAMEKFDKALKALPMHIRLSFNPTQLEEQCRI

SEQ ID NO: 610 - protein, 162 aa, Rangifer tarandus
IIVTQTMKDLDVQKVAGTWYSLAMAASDISLLDAQSAPLRVYVEELKPTPGGDLEILLQKWENGKCAQKKIIAEKTEIPAVFKIDALNENKVLVLDTDYKKYLLFCMENSAEPEQSLACQCLVRTPEVDDEAMEKFDKALKALPMHIRLSFNPTQLEEQCRV

SEQ ID NO: 611 - protein, 180 aa, Rangifer tarandus
MKCLLITLGLALACGAQAIIVTQTMKDLDVQKVAGTWYSLAMAASDISLLDAQSAPLRVYVEELKPTPGGDLEILLQKWENGKCAQKKIIAEKTEIPAVFKIDALNENKVLVLDTDYKKYLLFCMENSAEPEQSLACQCLVRTPEVDDEAMEKFDKALKALPMHIRLSFNPTQLEEQCRV

SEQ ID NO: 612 - protein, 180 aa, Muntiacus muntjak
MKCLLLALGLALACGAQAIVVTQTMKDLDIQKVAGTWYSLAMAASDISLLDAQSAPLRVYVEELKPTPEGDLEILLQKWENGECAQKKITAEKTEIPAVFKIDALNENEVLVLDTDYEKYLLFCMDNSAEPEQSLACQCLVRTPEVDAEAMEKFDKALEALPMHIRLSFNPTQLEEQCHV

SEQ ID NO: 613 - protein, 180 aa, Muntiacus reevesi
MKCLLLALGLALACGAQAIIVTQTMKDLDIQKVAGTWYSLAMAASDISLLDAQSAPLRVYVEELKPTPEGDLEILLQKWENGECAQKKITAEKTEIPAVFKIDALNENNVLVLDTDYEKYLLFCMDNSAEPEQSLACQCLVRTPEVDAEAMEKFDKALEALPMHIRLSFNPTQLEEHCHV

SEQ ID NO: 614 - protein, 162 aa, Equus caballus
TNIPQTMQDLDLQEVAGTWYSLAMAASDISLLDSESAPLRVYVEELKPTPEGDLEILLQKWENKGCAQKKIIAEKTESPAEFKIDALDENKVLVLDTDYKNYLLFCMENAATPGQSLACQALVRTQMVDDEALEKFDKALQPLPMHIRLSFNPTRMAERCRI

SEQ ID NO: 615 - DNA, 807 bp, synthetic construct
  misc_feature 1..807: note = fusion protein (paraOKC1-T:FM:OLG1)
  source 1..807: mol_type = other DNA
caagagcagaatcaagagcagccaatccgttgtgagaaggacgagaggttcttctcagacaagatcgccaaatatatacccatacaatatgtactctcacgctaccctagctacgggcttaactactatcagcaaaaacctgtagcactgataaataaccagtttctcccctatccctattatgctaaacctgccgccgtgaggagtccagcacaaatacttcagtggcaagtgctcagtaacaccgtgccagcaaaaagctgccaggctcagcccaccacaatggcccgtcatccccatcctcaccttagcttcatgttgatcgtaacacagactatgaagggtcttgatatacagaaggtggccgggacttggtacagtttggcaatggccgcatccgacatctccttgttggacgcacaatcagccccattgcgtgtgtacgtagaagagcttaaaccaactcccgagggggatctggaaattctgctccagaaatgggagaacggtgagtgcgcccagaagaagatcatcgcagagaagaccaaaattccagcagtattcaaaatcgacgcattgaacgaaaataaggtgctcgtactggacactgattataagaagtatctccttttctgtatggagaactcagcagagcctgaacagagtcttgcctgccaatgccttgttcgtaccccagaggtagatgatgaagctctggaaaagttcgataaggcccttaaggctctgcctatgcacattaggctttctttcaatccaactcaacttgaggaacaatgtcacatttaa

SEQ ID NO: 616 - protein, 268 aa, synthetic construct
  REGION 1..268: note = fusion protein (paraOKC1-T:FM:OLG1)
QEQNQEQPIRCEKDERFFSDKIAKYIPIQYVLSRYPSYGLNYYQQKPVALINNQFLPYPYYAKPAAVRSPAQILQWQVLSNTVPAKSCQAQPTTMARHPHPHLSFMLIVTQTMKGLDIQKVAGTWYSLAMAASDISLLDAQSAPLRVYVEELKPTPEGDLEILLQKWENGECAQKKIIAEKTKIPAVFKIDALNENKVLVLDTDYKKYLLFCMENSAEPEQSLACQCLVRTPEVDDEALEKFDKALKALPMHIRLSFNPTQLEEQCHI

SEQ ID NO: 617 - DNA, 819 bp, synthetic construct
  misc_feature 1..819: note = fusion protein (paraOKC1-T:FM:OLG1:KDEL)
  source 1..819: mol_type = other DNA
caagagcagaatcaagagcagccaatccgttgtgagaaggacgagaggttcttctcagacaagatcgccaaatatatacccatacaatatgtactctcacgctaccctagctacgggcttaactactatcagcaaaaacctgtagcactgataaataaccagtttctcccctatccctattatgctaaacctgccgccgtgaggagtccagcacaaatacttcagtggcaagtgctcagtaacaccgtgccagcaaaaagctgccaggctcagcccaccacaatggcccgtcatccccatcctcaccttagcttcatgttgatcgtaacacagactatgaagggtcttgatatacagaaggtggccgggacttggtacagtttggcaatggccgcatccgacatctccttgttggacgcacaatcagccccattgcgtgtgtacgtagaagagcttaaaccaactcccgagggggatctggaaattctgctccagaaatgggagaacggtgagtgcgcccagaagaagatcatcgcagagaagaccaaaattccagcagtattcaaaatcgacgcattgaacgaaaataaggtgctcgtactggacactgattataagaagtatctccttttctgtatggagaactcagcagagcctgaacagagtcttgcctgccaatgccttgttcgtaccccagaggtagatgatgaagctctggaaaagttcgataaggcccttaaggctctgcctatgcacattaggctttctttcaatccaactcaacttgaggaacaatgtcacattaaggatgagctttaa

SEQ ID NO: 618 - protein, 272 aa, synthetic construct
  REGION 1..272: note = fusin protein (paraOKC1-T:FM:OLG1:KDEL)
QEQNQEQPIRCEKDERFFSDKIAKYIPIQYVLSRYPSYGLNYYQQKPVALINNQFLPYPYYAKPAAVRSPAQILQWQVLSNTVPAKSCQAQPTTMARHPHPHLSFMLIVTQTMKGLDIQKVAGTWYSLAMAASDISLLDAQSAPLRVYVEELKPTPEGDLEILLQKWENGECAQKKIIAEKTKIPAVFKIDALNENKVLVLDTDYKKYLLFCMENSAEPEQSLACQCLVRTPEVDDEALEKFDKALKALPMHIRLSFNPTQLEEQCHIKDEL

SEQ ID NO: 619 - DNA, 804 bp, synthetic construct
  misc_feature 1..804: note = fusion protein (paraOKC1-T:OLG1)
  source 1..804: mol_type = other DNA
caagagcagaatcaagagcagccaatccgttgtgagaaggacgagaggttcttctcagacaagatcgccaaatatatacccatacaatatgtactctcacgctaccctagctacgggcttaactactatcagcaaaaacctgtagcactgataaataaccagtttctcccctatccctattatgctaaacctgccgccgtgaggagtccagcacaaatacttcagtggcaagtgctcagtaacaccgtgccagcaaaaagctgccaggctcagcccaccacaatggcccgtcatccccatcctcaccttagcttcttgatcgtaacacagactatgaagggtcttgatatacagaaggtggccgggacttggtacagtttggcaatggccgcatccgacatctccttgttggacgcacaatcagccccattgcgtgtgtacgtagaagagcttaaaccaactcccgagggggatctggaaattctgctccagaaatgggagaacggtgagtgcgcccagaagaagatcatcgcagagaagaccaaaattccagcagtattcaaaatcgacgcattgaacgaaaataaggtgctcgtactggacactgattataagaagtatctccttttctgtatggagaactcagcagagcctgaacagagtcttgcctgccaatgccttgttcgtaccccagaggtagatgatgaagctctggaaaagttcgataaggcccttaaggctctgcctatgcacattaggctttctttcaatccaactcaacttgaggaacaatgtcacatttaa

SEQ ID NO: 620 - protein, 267 aa, synthetic construct
  REGION 1..267: note = fusion protein (paraOKC1-T:OLG1)
QEQNQEQPIRCEKDERFFSDKIAKYIPIQYVLSRYPSYGLNYYQQKPVALINNQFLPYPYYAKPAAVRSPAQILQWQVLSNTVPAKSCQAQPTTMARHPHPHLSFLIVTQTMKGLDIQKVAGTWYSLAMAASDISLLDAQSAPLRVYVEELKPTPEGDLEILLQKWENGECAQKKIIAEKTKIPAVFKIDALNENKVLVLDTDYKKYLLFCMENSAEPEQSLACQCLVRTPEVDDEALEKFDKALKALPMHIRLSFNPTQLEEQCHI

SEQ ID NO: 621 - DNA, 816 bp, synthetic construct
  misc_feature 1..816: note = fusion protein (paraOKC1-T:OLG1:KDEL)
  source 1..816: mol_type = other DNA
caagagcagaatcaagagcagccaatccgttgtgagaaggacgagaggttcttctcagacaagatcgccaaatatatacccatacaatatgtactctcacgctaccctagctacgggcttaactactatcagcaaaaacctgtagcactgataaataaccagtttctcccctatccctattatgctaaacctgccgccgtgaggagtccagcacaaatacttcagtggcaagtgctcagtaacaccgtgccagcaaaaagctgccaggctcagcccaccacaatggcccgtcatccccatcctcaccttagcttcttgatcgtaacacagactatgaagggtcttgatatacagaaggtggccgggacttggtacagtttggcaatggccgcatccgacatctccttgttggacgcacaatcagccccattgcgtgtgtacgtagaagagcttaaaccaactcccgagggggatctggaaattctgctccagaaatgggagaacggtgagtgcgcccagaagaagatcatcgcagagaagaccaaaattccagcagtattcaaaatcgacgcattgaacgaaaataaggtgctcgtactggacactgattataagaagtatctccttttctgtatggagaactcagcagagcctgaacagagtcttgcctgccaatgccttgttcgtaccccagaggtagatgatgaagctctggaaaagttcgataaggcccttaaggctctgcctatgcacattaggctttctttcaatccaactcaacttgaggaacaatgtcacattaaggatgagctttaa

SEQ ID NO: 622 - protein, 271 aa, synthetic construct
  REGION 1..271: note = fusion protein (paraOKC1-T:OLG1:KDEL)
QEQNQEQPIRCEKDERFFSDKIAKYIPIQYVLSRYPSYGLNYYQQKPVALINNQFLPYPYYAKPAAVRSPAQILQWQVLSNTVPAKSCQAQPTTMARHPHPHLSFLIVTQTMKGLDIQKVAGTWYSLAMAASDISLLDAQSAPLRVYVEELKPTPEGDLEILLQKWENGECAQKKIIAEKTKIPAVFKIDALNENKVLVLDTDYKKYLLFCMENSAEPEQSLACQCLVRTPEVDDEALEKFDKALKALPMHIRLSFNPTQLEEQCHIKDEL

SEQ ID NO: 623 - DNA, 810 bp, synthetic construct
  misc_feature 1..810: note = fusion protein (OLG:FM:paraOKC1-T)
  source 1..810: mol_type = other DNA
ttgatcgtaacacagactatgaagggtcttgatatacagaaggtggccgggacttggtacagtttggcaatggccgcatccgacatctccttgttggacgcacaatcagccccattgcgtgtgtacgtagaagagcttaaaccaactcccgagggggatctggaaattctgctccagaaatgggagaacggtgagtgcgcccagaagaagatcatcgcagagaagaccaaaattccagcagtattcaaaatcgacgcattgaacgaaaataaggtgctcgtactggacactgattataagaagtatctccttttctgtatggagaactcagcagagcctgaacagagtcttgcctgccaatgccttgttcgtaccccagaggtagatgatgaagctctggaaaagttcgataaggcccttaaggctctgcctatgcacattaggctttctttcaatccaactcaacttgaggaacaatgtcacattttcatgcaagagcagaatcaagagcagccaatccgttgtgagaaggacgagaggttcttctcagacaagatcgccaaatatatacccatacaatatgtactctcacgctaccctagctacgggcttaactactatcagcaaaaacctgtagcactgataaataaccagtttctcccctatccctattatgctaaacctgccgccgtgaggagtccagcacaaatacttcagtggcaagtgctcagtaacaccgtgccagcaaaaagctgccaggctcagcccaccacaatggcccgtcatccccatcctcaccttagcttctaa

SEQ ID NO: 624 - protein, 269 aa, synthetic construct
  REGION 1..269: note = fusion protein (OLG:FM:paraOKC1-T)
LIVTQTMKGLDIQKVAGTWYSLAMAASDISLLDAQSAPLRVYVEELKPTPEGDLEILLQKWENGECAQKKIIAEKTKIPAVFKIDALNENKVLVLDTDYKKYLLFCMENSAEPEQSLACQCLVRTPEVDDEALEKFDKALKALPMHIRLSFNPTQLEEQCHIFMQEQNQEQPIRCEKDERFFSDKIAKYIPIQYVLSRYPSYGLNYYQQKPVALINNQFLPYPYYAKPAAVRSPAQILQWQVLSNTVPAKSCQAQPTTMARHPHPHLSF

SEQ ID NO: 625 - DNA, 822 bp, synthetic construct
  misc_feature 1..822: note = fusion protein (OLG:FM:paraOKC1-T:KDEL)
  source 1..822: mol_type = other DNA
ttgatcgtaacacagactatgaagggtcttgatatacagaaggtggccgggacttggtacagtttggcaatggccgcatccgacatctccttgttggacgcacaatcagccccattgcgtgtgtacgtagaagagcttaaaccaactcccgagggggatctggaaattctgctccagaaatgggagaacggtgagtgcgcccagaagaagatcatcgcagagaagaccaaaattccagcagtattcaaaatcgacgcattgaacgaaaataaggtgctcgtactggacactgattataagaagtatctccttttctgtatggagaactcagcagagcctgaacagagtcttgcctgccaatgccttgttcgtaccccagaggtagatgatgaagctctggaaaagttcgataaggcccttaaggctctgcctatgcacattaggctttctttcaatccaactcaacttgaggaacaatgtcacattttcatgcaagagcagaatcaagagcagccaatccgttgtgagaaggacgagaggttcttctcagacaagatcgccaaatatatacccatacaatatgtactctcacgctaccctagctacgggcttaactactatcagcaaaaacctgtagcactgataaataaccagtttctcccctatccctattatgctaaacctgccgccgtgaggagtccagcacaaatacttcagtggcaagtgctcagtaacaccgtgccagcaaaaagctgccaggctcagcccaccacaatggcccgtcatccccatcctcaccttagcttcaaggatgagctttaa

SEQ ID NO: 626 - protein, 273 aa, synthetic construct
  REGION 1..273: note = fusion protein (OLG:FM:paraOKC1-T:KDEL)
LIVTQTMKGLDIQKVAGTWYSLAMAASDISLLDAQSAPLRVYVEELKPTPEGDLEILLQKWENGECAQKKIIAEKTKIPAVFKIDALNENKVLVLDTDYKKYLLFCMENSAEPEQSLACQCLVRTPEVDDEALEKFDKALKALPMHIRLSFNPTQLEEQCHIFMQEQNQEQPIRCEKDERFFSDKIAKYIPIQYVLSRYPSYGLNYYQQKPVALINNQFLPYPYYAKPAAVRSPAQILQWQVLSNTVPAKSCQAQPTTMARHPHPHLSFKDEL

SEQ ID NO: 627 - DNA, 804 bp, synthetic construct
  misc_feature 1..804: note = fusion protein (OLG:paraOKC1-T)
  source 1..804: mol_type = other DNA
ttgatcgtaacacagactatgaagggtcttgatatacagaaggtggccgggacttggtacagtttggcaatggccgcatccgacatctccttgttggacgcacaatcagccccattgcgtgtgtacgtagaagagcttaaaccaactcccgagggggatctggaaattctgctccagaaatgggagaacggtgagtgcgcccagaagaagatcatcgcagagaagaccaaaattccagcagtattcaaaatcgacgcattgaacgaaaataaggtgctcgtactggacactgattataagaagtatctccttttctgtatggagaactcagcagagcctgaacagagtcttgcctgccaatgccttgttcgtaccccagaggtagatgatgaagctctggaaaagttcgataaggcccttaaggctctgcctatgcacattaggctttctttcaatccaactcaacttgaggaacaatgtcacattcaagagcagaatcaagagcagccaatccgttgtgagaaggacgagaggttcttctcagacaagatcgccaaatatatacccatacaatatgtactctcacgctaccctagctacgggcttaactactatcagcaaaaacctgtagcactgataaataaccagtttctcccctatccctattatgctaaacctgccgccgtgaggagtccagcacaaatacttcagtggcaagtgctcagtaacaccgtgccagcaaaaagctgccaggctcagcccaccacaatggcccgtcatccccatcctcaccttagcttctaa

SEQ ID NO: 628 - protein, 271 aa, synthetic construct
  REGION 1..271: note = fusion protein (OLG:paraOKC1-T)
LIVTQTMKGLDIQKVAGTWYSLAMAASDISLLDAQSAPLRVYVEELKPTPEGDLEILLQKWENGECAQKKIIAEKTKIPAVFKIDALNENKVLVLDTDYKKYLLFCMENSAEPEQSLACQCLVRTPEVDDEALEKFDKALKALPMHIRLSFNPTQLEEQCHIQEQNQEQPIRCEKDERFFSDKIAKYIPIQYVLSRYPSYGLNYYQQKPVALINNQFLPYPYYAKPAAVRSPAQILQWQVLSNTVPAKSCQAQPTTMARHPHPHLSFKDEL

SEQ ID NO: 629 - DNA, 816 bp, synthetic construct
  misc_feature 1..816: note = fusion protein (OLG:paraOKC1-T:KDEL)
  source 1..816: mol_type = other DNA
ttgatcgtaacacagactatgaagggtcttgatatacagaaggtggccgggacttggtacagtttggcaatggccgcatccgacatctccttgttggacgcacaatcagccccattgcgtgtgtacgtagaagagcttaaaccaactcccgagggggatctggaaattctgctccagaaatgggagaacggtgagtgcgcccagaagaagatcatcgcagagaagaccaaaattccagcagtattcaaaatcgacgcattgaacgaaaataaggtgctcgtactggacactgattataagaagtatctccttttctgtatggagaactcagcagagcctgaacagagtcttgcctgccaatgccttgttcgtaccccagaggtagatgatgaagctctggaaaagttcgataaggcccttaaggctctgcctatgcacattaggctttctttcaatccaactcaacttgaggaacaatgtcacattcaagagcagaatcaagagcagccaatccgttgtgagaaggacgagaggttcttctcagacaagatcgccaaatatatacccatacaatatgtactctcacgctaccctagctacgggcttaactactatcagcaaaaacctgtagcactgataaataaccagtttctcccctatccctattatgctaaacctgccgccgtgaggagtccagcacaaatacttcagtggcaagtgctcagtaacaccgtgccagcaaaaagctgccaggctcagcccaccacaatggcccgtcatccccatcctcaccttagcttcaaggatgagctttaa

SEQ ID NO: 630 - protein, 271 aa, synthetic construct; identical to SEQ ID NO: 628
  REGION 1..271: note = fusion protein (OLG:paraOKC1-T:KDEL)

SEQ ID NO: 631 - DNA, 1092 bp, synthetic construct
  misc_feature 1..1092: note = fusion protein (OaS1-T:FM:OLG1)
  source 1..1092: mol_type = other DNA
cgcccaaaacatcccataaaacatcaaggattgccccaggaagtactcaacgagaatctcctccgttttttcgttgctcctttccccgaagtgttcgggaaggaaaaagtaaacgagctttcaaaggacatcggctctgaaagtaccgaggatcaggctatggaagatatcaagcaaatggaggccgaatctataagttcttcagaagaaatagttcccaactcagtggagcagaagcacattcagaaagaagacgtgcccagcgagcgctatctgggatatttggaacagctgctcagactgaaaaagtacaaggtgcctcagctcgaaatcgtacccaatagtgctgaagaaaggttgcactcaatgaaagaggggattcacgcacaacaaaaagagcctatgatcggagtaaatcaagaactggcatacttttatcccgagttgtttcgccaattctatcaactggatgcctacccttccggtgcatggtactacgtacccctcggtactcaatataccgatgctccctccttttccgacattcctaatcctataggttccgagaatagcgaaaagaccaccatgcccttatggttcatgttgatcgtaacacagactatgaagggtcttgatatacagaaggtggccgggacttggtacagtttggcaatggccgcatccgacatctccttgttggacgcacaatcagccccattgcgtgtgtacgtagaagagcttaaaccaactcccgagggggatctggaaattctgctccagaaatgggagaacggtgagtgcgcccagaagaagatcatcgcagagaagaccaaaattccagcagtattcaaaatcgacgcattgaacgaaaataaggtgctcgtactggacactgattataagaagtatctccttttctgtatggagaactcagcagagcctgaacagagtcttgcctgccaatgccttgttcgtaccccagaggtagatgatgaagctctggaaaagttcgataaggcccttaaggctctgcctatgcacattaggctttctttcaatccaactcaacttgaggaacaatgtcacatttaa

SEQ ID NO: 632 - protein, 363 aa, synthetic construct
  REGION 1..363: note = fusion protein (OaS1-T:FM:OLG1)
RPKHPIKHQGLPQEVLNENLLRFFVAPFPEVFGKEKVNELSKDIGSESTEDQAMEDIKQMEAESISSSEEIVPNSVEQKHIQKEDVPSERYLGYLEQLLRLKKYKVPQLEIVPNSAEERLHSMKEGIHAQQKEPMIGVNQELAYFYPELFRQFYQLDAYPSGAWYYVPLGTQYTDAPSFSDIPNPIGSENSEKTTMPLWFMLIVTQTMKGLDIQKVAGTWYSLAMAASDISLLDAQSAPLRVYVEELKPTPEGDLEILLQKWENGECAQKKIIAEKTKIPAVFKIDALNENKVLVLDTDYKKYLLFCMENSAEPEQSLACQCLVRTPEVDDEALEKFDKALKALPMHIRLSFNPTQLEEQCHI

SEQ ID NO: 633 - DNA, 1104 bp, synthetic construct
  misc_feature 1..1104: note = fusion protein (OaS1-T:FM:OLG1:KDEL)
  source 1..1104: mol_type = other DNA
cgcccaaaacatcccataaaacatcaaggattgccccaggaagtactcaacgagaatctcctccgttttttcgttgctcctttccccgaagtgttcgggaaggaaaaagtaaacgagctttcaaaggacatcggctctgaaagtaccgaggatcaggctatggaagatatcaagcaaatggaggccgaatctataagttcttcagaagaaatagttcccaactcagtggagcagaagcacattcagaaagaagacgtgcccagcgagcgctatctgggatatttggaacagctgctcagactgaaaaagtacaaggtgcctcagctcgaaatcgtacccaatagtgctgaagaaaggttgcactcaatgaaagaggggattcacgcacaacaaaaagagcctatgatcggagtaaatcaagaactggcatacttttatcccgagttgtttcgccaattctatcaactggatgcctacccttccggtgcatggtactacgtacccctcggtactcaatataccgatgctccctccttttccgacattcctaatcctataggttccgagaatagcgaaaagaccaccatgcccttatggttcatgttgatcgtaacacagactatgaagggtcttgatatacagaaggtggccgggacttggtacagtttggcaatggccgcatccgacatctccttgttggacgcacaatcagccccattgcgtgtgtacgtagaagagcttaaaccaactcccgagggggatctggaaattctgctccagaaatgggagaacggtgagtgcgcccagaagaagatcatcgcagagaagaccaaaattccagcagtattcaaaatcgacgcattgaacgaaaataaggtgctcgtactggacactgattataagaagtatctccttttctgtatggagaactcagcagagcctgaacagagtcttgcctgccaatgccttgttcgtaccccagaggtagatgatgaagctctggaaaagttcgataaggcccttaaggctctgcctatgcacattaggctttctttcaatccaactcaacttgaggaacaatgtcacattaaggatgagctttaa

SEQ ID NO: 634 - protein, 367 aa, synthetic construct
  REGION 1..367: note = fusion protein (OaS1-T:FM:OLG1:KDEL)
RPKHPIKHQGLPQEVLNENLLRFFVAPFPEVFGKEKVNELSKDIGSESTEDQAMEDIKQMEAESISSSEEIVPNSVEQKHIQKEDVPSERYLGYLEQLLRLKKYKVPQLEIVPNSAEERLHSMKEGIHAQQKEPMIGVNQELAYFYPELFRQFYQLDAYPSGAWYYVPLGTQYTDAPSFSDIPNPIGSENSEKTTMPLWFMLIVTQTMKGLDIQKVAGTWYSLAMAASDISLLDAQSAPLRVYVEELKPTPEGDLEILLQKWENGECAQKKIIAEKTKIPAVFKIDALNENKVLVLDTDYKKYLLFCMENSAEPEQSLACQCLVRTPEVDDEALEKFDKALKALPMHIRLSFNPTQLEEQCHIKDEL

SEQ ID NO: 635 - DNA, 1086 bp, synthetic construct
  misc_feature 1..1086: note = fusion protein (OaS1-T:OLG1)
  source 1..1086: mol_type = other DNA
cgcccaaaacatcccataaaacatcaaggattgccccaggaagtactcaacgagaatctcctccgttttttcgttgctcctttccccgaagtgttcgggaaggaaaaagtaaacgagctttcaaaggacatcggctctgaaagtaccgaggatcaggctatggaagatatcaagcaaatggaggccgaatctataagttcttcagaagaaatagttcccaactcagtggagcagaagcacattcagaaagaagacgtgcccagcgagcgctatctgggatatttggaacagctgctcagactgaaaaagtacaaggtgcctcagctcgaaatcgtacccaatagtgctgaagaaaggttgcactcaatgaaagaggggattcacgcacaacaaaaagagcctatgatcggagtaaatcaagaactggcatacttttatcccgagttgtttcgccaattctatcaactggatgcctacccttccggtgcatggtactacgtacccctcggtactcaatataccgatgctccctccttttccgacattcctaatcctataggttccgagaatagcgaaaagaccaccatgcccttatggttgatcgtaacacagactatgaagggtcttgatatacagaaggtggccgggacttggtacagtttggcaatggccgcatccgacatctccttgttggacgcacaatcagccccattgcgtgtgtacgtagaagagcttaaaccaactcccgagggggatctggaaattctgctccagaaatgggagaacggtgagtgcgcccagaagaagatcatcgcagagaagaccaaaattccagcagtattcaaaatcgacgcattgaacgaaaataaggtgctcgtactggacactgattataagaagtatctccttttctgtatggagaactcagcagagcctgaacagagtcttgcctgccaatgccttgttcgtaccccagaggtagatgatgaagctctggaaaagttcgataaggcccttaaggctctgcctatgcacattaggctttctttcaatccaactcaacttgaggaacaatgtcacatttaa

SEQ ID NO: 636 - protein, 361 aa, synthetic construct
  REGION 1..361: note = fusion protein (OaS1-T:OLG1)
RPKHPIKHQGLPQEVLNENLLRFFVAPFPEVFGKEKVNELSKDIGSESTEDQAMEDIKQMEAESISSSEEIVPNSVEQKHIQKEDVPSERYLGYLEQLLRLKKYKVPQLEIVPNSAEERLHSMKEGIHAQQKEPMIGVNQELAYFYPELFRQFYQLDAYPSGAWYYVPLGTQYTDAPSFSDIPNPIGSENSEKTTMPLWLIVTQTMKGLDIQKVAGTWYSLAMAASDISLLDAQSAPLRVYVEELKPTPEGDLEILLQKWENGECAQKKIIAEKTKIPAVFKIDALNENKVLVLDTDYKKYLLFCMENSAEPEQSLACQCLVRTPEVDDEALEKFDKALKALPMHIRLSFNPTQLEEQCHI

SEQ ID NO: 637 - DNA, 1098 bp, synthetic construct
  misc_feature 1..1098: note = fusion protein (OaS1-T:OLG1:KDEL)
  source 1..1098: mol_type = other DNA
cgcccaaaacatcccataaaacatcaaggattgccccaggaagtactcaacgagaatctcctccgttttttcgttgctcctttccccgaagtgttcgggaaggaaaaagtaaacgagctttcaaaggacatcggctctgaaagtaccgaggatcaggctatggaagatatcaagcaaatggaggccgaatctataagttcttcagaagaaatagttcccaactcagtggagcagaagcacattcagaaagaagacgtgcccagcgagcgctatctgggatatttggaacagctgctcagactgaaaaagtacaaggtgcctcagctcgaaatcgtacccaatagtgctgaagaaaggttgcactcaatgaaagaggggattcacgcacaacaaaaagagcctatgatcggagtaaatcaagaactggcatacttttatcccgagttgtttcgccaattctatcaactggatgcctacccttccggtgcatggtactacgtacccctcggtactcaatataccgatgctccctccttttccgacattcctaatcctataggttccgagaatagcgaaaagaccaccatgcccttatggttgatcgtaacacagactatgaagggtcttgatatacagaaggtggccgggacttggtacagtttggcaatggccgcatccgacatctccttgttggacgcacaatcagccccattgcgtgtgtacgtagaagagcttaaaccaactcccgagggggatctggaaattctgctccagaaatgggagaacggtgagtgcgcccagaagaagatcatcgcagagaagaccaaaattccagcagtattcaaaatcgacgcattgaacgaaaataaggtgctcgtactggacactgattataagaagtatctccttttctgtatggagaactcagcagagcctgaacagagtcttgcctgccaatgccttgttcgtaccccagaggtagatgatgaagctctggaaaagttcgataaggcccttaaggctctgcctatgcacattaggctttctttcaatccaactcaacttgaggaacaatgtcacattaaggatgagctttaa

SEQ ID NO: 638 - protein, 365 aa, synthetic construct
  REGION 1..365: note = fusion protein (OaS1-T:OLG1:KDEL)
RPKHPIKHQGLPQEVLNENLLRFFVAPFPEVFGKEKVNELSKDIGSESTEDQAMEDIKQMEAESISSSEEIVPNSVEQKHIQKEDVPSERYLGYLEQLLRLKKYKVPQLEIVPNSAEERLHSMKEGIHAQQKEPMIGVNQELAYFYPELFRQFYQLDAYPSGAWYYVPLGTQYTDAPSFSDIPNPIGSENSEKTTMPLWLIVTQTMKGLDIQKVAGTWYSLAMAASDISLLDAQSAPLRVYVEELKPTPEGDLEILLQKWENGECAQKKIIAEKTKIPAVFKIDALNENKVLVLDTDYKKYLLFCMENSAEPEQSLACQCLVRTPEVDDEALEKFDKALKALPMHIRLSFNPTQLEEQCHIKDEL

SEQ ID NO: 639 - DNA, 1092 bp, synthetic construct
  misc_feature 1..1092: note = fusion protein (OLG1:FM:OaS1-T)
  source 1..1092: mol_type = other DNA
ttgatcgtaacacagactatgaagggtcttgatatacagaaggtggccgggacttggtacagtttggcaatggccgcatccgacatctccttgttggacgcacaatcagccccattgcgtgtgtacgtagaagagcttaaaccaactcccgagggggatctggaaattctgctccagaaatgggagaacggtgagtgcgcccagaagaagatcatcgcagagaagaccaaaattccagcagtattcaaaatcgacgcattgaacgaaaataaggtgctcgtactggacactgattataagaagtatctccttttctgtatggagaactcagcagagcctgaacagagtcttgcctgccaatgccttgttcgtaccccagaggtagatgatgaagctctggaaaagttcgataaggcccttaaggctctgcctatgcacattaggctttctttcaatccaactcaacttgaggaacaatgtcacattttcatgcgcccaaaacatcccataaaacatcaaggattgccccaggaagtactcaacgagaatctcctccgttttttcgttgctcctttccccgaagtgttcgggaaggaaaaagtaaacgagctttcaaaggacatcggctctgaaagtaccgaggatcaggctatggaagatatcaagcaaatggaggccgaatctataagttcttcagaagaaatagttcccaactcagtggagcagaagcacattcagaaagaagacgtgcccagcgagcgctatctgggatatttggaacagctgctcagactgaaaaagtacaaggtgcctcagctcgaaatcgtacccaatagtgctgaagaaaggttgcactcaatgaaagaggggattcacgcacaacaaaaagagcctatgatcggagtaaatcaagaactggcatacttttatcccgagttgtttcgccaattctatcaactggatgcctacccttccggtgcatggtactacgtacccctcggtactcaatataccgatgctccctccttttccgacattcctaatcctataggttccgagaatagcgaaaagaccaccatgcccttatggtaa

SEQ ID NO: 640 - protein, 363 aa, synthetic construct
  REGION 1..363: note = fusion protein (OLG1:FM:OaS1-T)
LIVTQTMKGLDIQKVAGTWYSLAMAASDISLLDAQSAPLRVYVEELKPTPEGDLEILLQKWENGECAQKKIIAEKTKIPAVFKIDALNENKVLVLDTDYKKYLLFCMENSAEPEQSLACQCLVRTPEVDDEALEKFDKALKALPMHIRLSFNPTQLEEQCHIFMRPKHPIKHQGLPQEVLNENLLRFFVAPFPEVFGKEKVNELSKDIGSESTEDQAMEDIKQMEAESISSSEEIVPNSVEQKHIQKEDVPSERYLGYLEQLLRLKKYKVPQLEIVPNSAEERLHSMKEGIHAQQKEPMIGVNQELAYFYPELFRQFYQLDAYPSGAWYYVPLGTQYTDAPSFSDIPNPIGSENSEKTTMPLW

SEQ ID NO: 641 - DNA, 1104 bp, synthetic construct
  misc_feature 1..1104: note = fusion protein (OLG1:FM:OaS1-T:KDEL)
  source 1..1104: mol_type = other DNA
ttgatcgtaacacagactatgaagggtcttgatatacagaaggtggccgggacttggtacagtttggcaatggccgcatccgacatctccttgttggacgcacaatcagccccattgcgtgtgtacgtagaagagcttaaaccaactcccgagggggatctggaaattctgctccagaaatgggagaacggtgagtgcgcccagaagaagatcatcgcagagaagaccaaaattccagcagtattcaaaatcgacgcattgaacgaaaataaggtgctcgtactggacactgattataagaagtatctccttttctgtatggagaactcagcagagcctgaacagagtcttgcctgccaatgccttgttcgtaccccagaggtagatgatgaagctctggaaaagttcgataaggcccttaaggctctgcctatgcacattaggctttctttcaatccaactcaacttgaggaacaatgtcacattttcatgcgcccaaaacatcccataaaacatcaaggattgccccaggaagtactcaacgagaatctcctccgttttttcgttgctcctttccccgaagtgttcgggaaggaaaaagtaaacgagctttcaaaggacatcggctctgaaagtaccgaggatcaggctatggaagatatcaagcaaatggaggccgaatctataagttcttcagaagaaatagttcccaactcagtggagcagaagcacattcagaaagaagacgtgcccagcgagcgctatctgggatatttggaacagctgctcagactgaaaaagtacaaggtgcctcagctcgaaatcgtacccaatagtgctgaagaaaggttgcactcaatgaaagaggggattcacgcacaacaaaaagagcctatgatcggagtaaatcaagaactggcatacttttatcccgagttgtttcgccaattctatcaactggatgcctacccttccggtgcatggtactacgtacccctcggtactcaatataccgatgctccctccttttccgacattcctaatcctataggttccgagaatagcgaaaagaccaccatgcccttatggaaggatgagctttaa

SEQ ID NO: 642 - protein, 367 aa, synthetic construct
  REGION 1..367: note = fusion protein (OLG1:FM:OaS1-T:KDEL)
LIVTQTMKGLDIQKVAGTWYSLAMAASDISLLDAQSAPLRVYVEELKPTPEGDLEILLQKWENGECAQKKIIAEKTKIPAVFKIDALNENKVLVLDTDYKKYLLFCMENSAEPEQSLACQCLVRTPEVDDEALEKFDKALKALPMHIRLSFNPTQLEEQCHIFMRPKHPIKHQGLPQEVLNENLLRFFVAPFPEVFGKEKVNELSKDIGSESTEDQAMEDIKQMEAESISSSEEIVPNSVEQKHIQKEDVPSERYLGYLEQLLRLKKYKVPQLEIVPNSAEERLHSMKEGIHAQQKEPMIGVNQELAYFYPELFRQFYQLDAYPSGAWYYVPLGTQYTDAPSFSDIPNPIGSENSEKTTMPLWKDEL

SEQ ID NO: 643 - DNA, 1086 bp, synthetic construct
  misc_feature 1..1086: note = fusion protein (OLG1:OaS1-T)
  source 1..1086: mol_type = other DNA
ttgatcgtaacacagactatgaagggtcttgatatacagaaggtggccgggacttggtacagtttggcaatggccgcatccgacatctccttgttggacgcacaatcagccccattgcgtgtgtacgtagaagagcttaaaccaactcccgagggggatctggaaattctgctccagaaatgggagaacggtgagtgcgcccagaagaagatcatcgcagagaagaccaaaattccagcagtattcaaaatcgacgcattgaacgaaaataaggtgctcgtactggacactgattataagaagtatctccttttctgtatggagaactcagcagagcctgaacagagtcttgcctgccaatgccttgttcgtaccccagaggtagatgatgaagctctggaaaagttcgataaggcccttaaggctctgcctatgcacattaggctttctttcaatccaactcaacttgaggaacaatgtcacattcgcccaaaacatcccataaaacatcaaggattgccccaggaagtactcaacgagaatctcctccgttttttcgttgctcctttccccgaagtgttcgggaaggaaaaagtaaacgagctttcaaaggacatcggctctgaaagtaccgaggatcaggctatggaagatatcaagcaaatggaggccgaatctataagttcttcagaagaaatagttcccaactcagtggagcagaagcacattcagaaagaagacgtgcccagcgagcgctatctgggatatttggaacagctgctcagactgaaaaagtacaaggtgcctcagctcgaaatcgtacccaatagtgctgaagaaaggttgcactcaatgaaagaggggattcacgcacaacaaaaagagcctatgatcggagtaaatcaagaactggcatacttttatcccgagttgtttcgccaattctatcaactggatgcctacccttccggtgcatggtactacgtacccctcggtactcaatataccgatgctccctccttttccgacattcctaatcctataggttccgagaatagcgaaaagaccaccatgcccttatggtaa

SEQ ID NO: 644 - protein, 361 aa, synthetic construct
  REGION 1..361: note = fusion protein (OLG1:OaS1-T)
LIVTQTMKGLDIQKVAGTWYSLAMAASDISLLDAQSAPLRVYVEELKPTPEGDLEILLQKWENGECAQKKIIAEKTKIPAVFKIDALNENKVLVLDTDYKKYLLFCMENSAEPEQSLACQCLVRTPEVDDEALEKFDKALKALPMHIRLSFNPTQLEEQCHIRPKHPIKHQGLPQEVLNENLLRFFVAPFPEVFGKEKVNELSKDIGSESTEDQAMEDIKQMEAESISSSEEIVPNSVEQKHIQKEDVPSERYLGYLEQLLRLKKYKVPQLEIVPNSAEERLHSMKEGIHAQQKEPMIGVNQELAYFYPELFRQFYQLDAYPSGAWYYVPLGTQYTDAPSFSDIPNPIGSENSEKTTMPLW

SEQ ID NO: 645 - DNA, 1098 bp, synthetic construct
  misc_feature 1..1098: note = fusion protein (OLG1:OaS1-T:KDEL)
  source 1..1098: mol_type = other DNA
ttgatcgtaacacagactatgaagggtcttgatatacagaaggtggccgggacttggtacagtttggcaatggccgcatccgacatctccttgttggacgcacaatcagccccattgcgtgtgtacgtagaagagcttaaaccaactcccgagggggatctggaaattctgctccagaaatgggagaacggtgagtgcgcccagaagaagatcatcgcagagaagaccaaaattccagcagtattcaaaatcgacgcattgaacgaaaataaggtgctcgtactggacactgattataagaagtatctccttttctgtatggagaactcagcagagcctgaacagagtcttgcctgccaatgccttgttcgtaccccagaggtagatgatgaagctctggaaaagttcgataaggcccttaaggctctgcctatgcacattaggctttctttcaatccaactcaacttgaggaacaatgtcacattcgcccaaaacatcccataaaacatcaaggattgccccaggaagtactcaacgagaatctcctccgttttttcgttgctcctttccccgaagtgttcgggaaggaaaaagtaaacgagctttcaaaggacatcggctctgaaagtaccgaggatcaggctatggaagatatcaagcaaatggaggccgaatctataagttcttcagaagaaatagttcccaactcagtggagcagaagcacattcagaaagaagacgtgcccagcgagcgctatctgggatatttggaacagctgctcagactgaaaaagtacaaggtgcctcagctcgaaatcgtacccaatagtgctgaagaaaggttgcactcaatgaaagaggggattcacgcacaacaaaaagagcctatgatcggagtaaatcaagaactggcatacttttatcccgagttgtttcgccaattctatcaactggatgcctacccttccggtgcatggtactacgtacccctcggtactcaatataccgatgctccctccttttccgacattcctaatcctataggttccgagaatagcgaaaagaccaccatgcccttatggaaggatgagctttaa

SEQ ID NO: 646 - protein, 365 aa, synthetic construct
  REGION 1..365: note = fusion protein (OLG1:OaS1-T:KDEL)
LIVTQTMKGLDIQKVAGTWYSLAMAASDISLLDAQSAPLRVYVEELKPTPEGDLEILLQKWENGECAQKKIIAEKTKIPAVFKIDALNENKVLVLDTDYKKYLLFCMENSAEPEQSLACQCLVRTPEVDDEALEKFDKALKALPMHIRLSFNPTQLEEQCHIRPKHPIKHQGLPQEVLNENLLRFFVAPFPEVFGKEKVNELSKDIGSESTEDQAMEDIKQMEAESISSSEEIVPNSVEQKHIQKEDVPSERYLGYLEQLLRLKKYKVPQLEIVPNSAEERLHSMKEGIHAQQKEPMIGVNQELAYFYPELFRQFYQLDAYPSGAWYYVPLGTQYTDAPSFSDIPNPIGSENSEKTTMPLWKDEL

SEQ ID NO: 647 - DNA, 1122 bp, synthetic construct
  misc_feature 1..1122: note = fusion protein (OLG1:FM:OBC-T2)
  source 1..1122: mol_type = other DNA
ttgatcgtaacacagactatgaagggtcttgatatacagaaggtggccgggacttggtacagtttggcaatggccgcatccgacatctccttgttggacgcacaatcagccccattgcgtgtgtacgtagaagagcttaaaccaactcccgagggggatctggaaattctgctccagaaatgggagaacggtgagtgcgcccagaagaagatcatcgcagagaagaccaaaattccagcagtattcaaaatcgacgcattgaacgaaaataaggtgctcgtactggacactgattataagaagtatctccttttctgtatggagaactcagcagagcctgaacagagtcttgcctgccaatgccttgttcgtaccccagaggtagatgatgaagctctggaaaagttcgataaggcccttaaggctctgcctatgcacattaggctttctttcaatccaactcaacttgaggaacaatgtcacattttcatgcgcgaactggaagagttgaacgtaccaggagagattgtagaatcactgagctcctcagaggagtctattactcgtatcaacaagaagatagagaagttccaatccgaggagcaacaacaaacagaggacgaattgcaggacaagatacatcctttcgcacagacccagagcctcgtctatccctttccaggtccaatccctaactctctcccccagaatatcccacccttgactcagactcccgtggtcgtaccccctttcttgcaacccgaggtgatgggggtttctaaagtcaaagaggctatggctcctaaacataaggaaatgccttttcccaaatatccagtggagccattcactgagagccagtctctgacacttacagatgtggaaaacttgcacctgcccttgccacttttgcagtcctggatgcaccaaccacatcaacccttgccccccacagtgatgtttcctccacaatcagttcttagtctctcccaaagcaaagtccttccagtgcctcagaaggccgtcccatacccccagagagatatgccaatacaggcattcttgctttaccaggaaccagtgctcggtcctgtacgtggcccattccctatcatagtgtaa

SEQ ID NO: 648 - protein, 373 aa, synthetic construct
  REGION 1..373: note = fusion protein (OLG1:FM:OBC-T2)
LIVTQTMKGLDIQKVAGTWYSLAMAASDISLLDAQSAPLRVYVEELKPTPEGDLEILLQKWENGECAQKKIIAEKTKIPAVFKIDALNENKVLVLDTDYKKYLLFCMENSAEPEQSLACQCLVRTPEVDDEALEKFDKALKALPMHIRLSFNPTQLEEQCHIFMRELEELNVPGEIVESLSSSEESITRINKKIEKFQSEEQQQTEDELQDKIHPFAQTQSLVYPFPGPIPNSLPQNIPPLTQTPVVVPPFLQPEVMGVSKVKEAMAPKHKEMPFPKYPVEPFTESQSLTLTDVENLHLPLPLLQSWMHQPHQPLPPTVMFPPQSVLSLSQSKVLPVPQKAVPYPQRDMPIQAFLLYQEPVLGPVRGPFPIIV

SEQ ID NO: 649 - DNA, 1623 bp, synthetic construct
  misc_feature 1..1623: note = fusion protein (OBC-T2:OKC1-T:OLG1)
  source 1..1623: mol_type = other DNA
cgcgaactggaagagttgaacgtaccaggagagattgtagaatcactgagctcctcagaggagtctattactcgtatcaacaagaagatagagaagttccaatccgaggagcaacaacaaacagaggacgaattgcaggacaagatacatcctttcgcacagacccagagcctcgtctatccctttccaggtccaatccctaactctctcccccagaatatcccacccttgactcagactcccgtggtcgtaccccctttcttgcaacccgaggtgatgggggtttctaaagtcaaagaggctatggctcctaaacataaggaaatgccttttcccaaatatccagtggagccattcactgagagccagtctctgacacttacagatgtggaaaacttgcacctgcccttgccacttttgcagtcctggatgcaccaaccacatcaacccttgccccccacagtgatgtttcctccacaatcagttcttagtctctcccaaagcaaagtccttccagtgcctcagaaggccgtcccatacccccagagagatatgccaatacaggcattcttgctttaccaggaaccagtgctcggtcctgtacgtggcccattccctatcatagtgcaagagcagaatcaagagcagccaatccgttgtgagaaggacgagaggttcttctcagacaagatcgccaaatatatacccatacaatatgtactctcacgctaccctagctacgggcttaactactatcagcaaaaacctgtagcactgataaataaccagtttctcccctatccctattatgctaaacctgccgccgtgaggagtccagcacaaatacttcagtggcaagtgctcagtaacaccgtgccagcaaaaagctgccaggctcagcccaccacaatggcccgtcatccccatcctcaccttagcttcatggcaatcccaccaaagaagaatcaagacaagaccgaaatacctaccatcaacacaattgcatctggagagcctaccagtacaccaacaactgaggcagtagagtctactgttgctacccttgaggacagccccgaggttatagagtccccacctgagataaataccgtgcaggtgacaagtaccgccgtattgatcgtaacacagactatgaagggtcttgatatacagaaggtggccgggacttggtacagtttggcaatggccgcatccgacatctccttgttggacgcacaatcagccccattgcgtgtgtacgtagaagagcttaaaccaactcccgagggggatctggaaattctgctccagaaatgggagaacggtgagtgcgcccagaagaagatcatcgcagagaagaccaaaattccagcagtattcaaaatcgacgcattgaacgaaaataaggtgctcgtactggacactgattataagaagtatctccttttctgtatggagaactcagcagagcctgaacagagtcttgcctgccaatgccttgttcgtaccccagaggtagatgatgaagctctggaaaagttcgataaggcccttaaggctctgcctatgcacattaggctttctttcaatccaactcaacttgaggaacaatgtcacatttaa

SEQ ID NO: 650 - protein, 540 aa, synthetic construct
  REGION 1..540: note = fusion protein (OBC-T2:OKC1-T:OLG1)
RELEELNVPGEIVESLSSSEESITRINKKIEKFQSEEQQQTEDELQDKIHPFAQTQSLVYPFPGPIPNSLPQNIPPLTQTPVVVPPFLQPEVMGVSKVKEAMAPKHKEMPFPKYPVEPFTESQSLTLTDVENLHLPLPLLQSWMHQPHQPLPPTVMFPPQSVLSLSQSKVLPVPQKAVPYPQRDMPIQAFLLYQEPVLGPVRGPFPIIVQEQNQEQPIRCEKDERFFSDKIAKYIPIQYVLSRYPSYGLNYYQQKPVALINNQFLPYPYYAKPAAVRSPAQILQWQVLSNTVPAKSCQAQPTTMARHPHPHLSFMAIPPKKNQDKTEIPTINTIASGEPTSTPTTEAVESTVATLEDSPEVIESPPEINTVQVTSTAVLIVTQTMKGLDIQKVAGTWYSLAMAASDISLLDAQSAPLRVYVEELKPTPEGDLEILLQKWENGECAQKKIIAEKTKIPAVFKIDALNENKVLVLDTDYKKYLLFCMENSAEPEQSLACQCLVRTPEVDDEALEKFDKALKALPMHIRLSFNPTQLEEQCHI

SEQ ID NO: 651 - DNA, 2250 bp, synthetic construct
  misc_feature 1..2250: note = fusion protein (OBC-T3:OBC-T2:OKC1-T:OLG1)
  source 1..2250: mol_type = other DNA
agggaactcgaggaacttaacgttccaggtgagatcgtcgagtccctctcatcttccgaagagtccattaccaggatcaacaagaagatcgagaagttccagtccgaggaacaacagcaaaccgaggatgagcttcaggacaagattcacccattcgctcagacccagtctctcgtgtatccatttccagggccaattccaaacagcctgccacagaacattccaccacttactcagaccccagttgtggtgccaccattccttcaaccagaggttatgggagtgtccaaggtgaaagaagccatggcaccaaagcacaaagagatgccctttccaaagtaccccgttgagccattcactgagtctcagtctcttaccctcaccgacgttgagaaccttcaccttccacttccattgctccagtcttggatgcatcaaccacatcagccacttccaccaaccgttatgttcccacctcagtccgtgcttagcctctctcagtctaaggttttgccagtgcctcagaaggccgttccatatccacaaagggatatgccaatccaggccttcttgctctaccaagagccagttcttggaccagtgagaggcccatttccaatcattgtgcgcgaactggaagagttgaacgtaccaggagagattgtagaatcactgagctcctcagaggagtctattactcgtatcaacaagaagatagagaagttccaatccgaggagcaacaacaaacagaggacgaattgcaggacaagatacatcctttcgcacagacccagagcctcgtctatccctttccaggtccaatccctaactctctcccccagaatatcccacccttgactcagactcccgtggtcgtaccccctttcttgcaacccgaggtgatgggggtttctaaagtcaaagaggctatggctcctaaacataaggaaatgccttttcccaaatatccagtggagccattcactgagagccagtctctgacacttacagatgtggaaaacttgcacctgcccttgccacttttgcagtcctggatgcaccaaccacatcaacccttgccccccacagtgatgtttcctccacaatcagttcttagtctctcccaaagcaaagtccttccagtgcctcagaaggccgtcccatacccccagagagatatgccaatacaggcattcttgctttaccaggaaccagtgctcggtcctgtacgtggcccattccctatcatagtgcaagagcagaatcaagagcagccaatccgttgtgagaaggacgagaggttcttctcagacaagatcgccaaatatatacccatacaatatgtactctcacgctaccctagctacgggcttaactactatcagcaaaaacctgtagcactgataaataaccagtttctcccctatccctattatgctaaacctgccgccgtgaggagtccagcacaaatacttcagtggcaagtgctcagtaacaccgtgccagcaaaaagctgccaggctcagcccaccacaatggcccgtcatccccatcctcaccttagcttcatggcaatcccaccaaagaagaatcaagacaagaccgaaatacctaccatcaacacaattgcatctggagagcctaccagtacaccaacaactgaggcagtagagtctactgttgctacccttgaggacagccccgaggttatagagtccccacctgagataaataccgtgcaggtgacaagtaccgccgtattgatcgtaacacagactatgaagggtcttgatatacagaaggtggccgggacttggtacagtttggcaatggccgcatccgacatctccttgttggacgcacaatcagccccattgcgtgtgtacgtagaagagcttaaaccaactcccgagggggatctggaaattctgctccagaaatgggagaacggtgagtgcgcccagaagaagatcatcgcagagaagaccaaaattccagcagtattcaaaatcgacgcattgaacgaaaataaggtgctcgtactggacactgattataagaagtatctccttttctgtatggagaactcagcagagcctgaacagagtcttgcctgccaatgccttgttcgtaccccagaggtagatgatgaagctctggaaaagttcgataaggcccttaaggctctgcctatgcacattaggctttctttcaatccaactcaacttgaggaacaatgtcacatttaa

SEQ ID NO: 652 - protein, 749 aa, synthetic construct
  REGION 1..749: note = fusion protein (OBC-T3:OBC-T2:OKC1-T:OLG1)
RELEELNVPGEIVESLSSSEESITRINKKIEKFQSEEQQQTEDELQDKIHPFAQTQSLVYPFPGPIPNSLPQNIPPLTQTPVVVPPFLQPEVMGVSKVKEAMAPKHKEMPFPKYPVEPFTESQSLTLTDVENLHLPLPLLQSWMHQPHQPLPPTVMFPPQSVLSLSQSKVLPVPQKAVPYPQRDMPIQAFLLYQEPVLGPVRGPFPIIVRELEELNVPGEIVESLSSSEESITRINKKIEKFQSEEQQQTEDELQDKIHPFAQTQSLVYPFPGPIPNSLPQNIPPLTQTPVVVPPFLQPEVMGVSKVKEAMAPKHKEMPFPKYPVEPFTESQSLTLTDVENLHLPLPLLQSWMHQPHQPLPPTVMFPPQSVLSLSQSKVLPVPQKAVPYPQRDMPIQAFLLYQEPVLGPVRGPFPIIVQEQNQEQPIRCEKDERFFSDKIAKYIPIQYVLSRYPSYGLNYYQQKPVALINNQFLPYPYYAKPAAVRSPAQILQWQVLSNTVPAKSCQAQPTTMARHPHPHLSFMAIPPKKNQDKTEIPTINTIASGEPTSTPTTEAVESTVATLEDSPEVIESPPEINTVQVTSTAVLIVTQTMKGLDIQKVAGTWYSLAMAASDISLLDAQSAPLRVYVEELKPTPEGDLEILLQKWENGECAQKKIIAEKTKIPAVFKIDALNENKVLVLDTDYKKYLLFCMENSAEPEQSLACQCLVRTPEVDDEALEKFDKALKALPMHIRLSFNPTQLEEQCHI

SEQ ID NO: 653 - DNA, 2877 bp, synthetic construct
  misc_feature 1..2877: note = fusion protein (OBC-T4:OBC-T3:OBC-T2:OKC1-T:OLG1)
  source 1..2877: mol_type = other DNA
agggagctcgaggagttgaacgtgcctggcgagattgtagagtcattgagctctagtgaggagagtataacaaggatcaataaaaagattgaaaaatttcaaagcgaagagcagcaacaaacagaagatgaactgcaagacaaaattcatccttttgctcagacacagagcttggtgtatcccttcccagggccaattcccaatagtctgccccaaaacatccctcccttgacccaaacccccgtagtagtacctccattcttgcagcctgaagtgatgggggtgagtaaagtgaaggaggcaatggcccctaagcataaagagatgccattccctaaatatcccgttgagccattcaccgaatcacaatccttgacacttactgatgtcgagaatttgcacttgccactgcccttgctccaaagctggatgcaccaaccacaccaacctctgcctcccacagtgatgttcccaccccaatccgtcttgtctctgtcccagtcaaaggtgttgcctgttcctcagaaagcagttccctatccccaacgcgatatgcccatccaggcttttctcttgtatcaagaaccagtgctcggtcctgtcagaggccccttccccattatcgtgagggaactcgaggaacttaacgttccaggtgagatcgtcgagtccctctcatcttccgaagagtccattaccaggatcaacaagaagatcgagaagttccagtccgaggaacaacagcaaaccgaggatgagcttcaggacaagattcacccattcgctcagacccagtctctcgtgtatccatttccagggccaattccaaacagcctgccacagaacattccaccacttactcagaccccagttgtggtgccaccattccttcaaccagaggttatgggagtgtccaaggtgaaagaagccatggcaccaaagcacaaagagatgccctttccaaagtaccccgttgagccattcactgagtctcagtctcttaccctcaccgacgttgagaaccttcaccttccacttccattgctccagtcttggatgcatcaaccacatcagccacttccaccaaccgttatgttcccacctcagtccgtgcttagcctctctcagtctaaggttttgccagtgcctcagaaggccgttccatatccacaaagggatatgccaatccaggccttcttgctctaccaagagccagttcttggaccagtgagaggcccatttccaatcattgtgcgcgaactggaagagttgaacgtaccaggagagattgtagaatcactgagctcctcagaggagtctattactcgtatcaacaagaagatagagaagttccaatccgaggagcaacaacaaacagaggacgaattgcaggacaagatacatcctttcgcacagacccagagcctcgtctatccctttccaggtccaatccctaactctctcccccagaatatcccacccttgactcagactcccgtggtcgtaccccctttcttgcaacccgaggtgatgggggtttctaaagtcaaagaggctatggctcctaaacataaggaaatgccttttcccaaatatccagtggagccattcactgagagccagtctctgacacttacagatgtggaaaacttgcacctgcccttgccacttttgcagtcctggatgcaccaaccacatcaacccttgccccccacagtgatgtttcctccacaatcagttcttagtctctcccaaagcaaagtccttccagtgcctcagaaggccgtcccatacccccagagagatatgccaatacaggcattcttgctttaccaggaaccagtgctcggtcctgtacgtggcccattccctatcatagtgcaagagcagaatcaagagcagccaatccgttgtgagaaggacgagaggttcttctcagacaagatcgccaaatatatacccatacaatatgtactctcacgctaccctagctacgggcttaactactatcagcaaaaacctgtagcactgataaataaccagtttctcccctatccctattatgctaaacctgccgccgtgaggagtccagcacaaatacttcagtggcaagtgctcagtaacaccgtgccagcaaaaagctgccaggctcagcccaccacaatggcccgtcatccccatcctcaccttagcttcatggcaatcccaccaaagaagaatcaagacaagaccgaaatacctaccatcaacacaattgcatctggagagcctaccagtacaccaacaactgaggcagtagagtctactgttgctacccttgaggacagccccgaggttatagagtccccacctgagataaataccgtgcaggtgacaagtaccgccgtattgatcgtaacacagactatgaagggtcttgatatacagaaggtggccgggacttggtacagtttggcaatggccgcatccgacatctccttgttggacgcacaatcagccccattgcgtgtgtacgtagaagagcttaaaccaactcccgagggggatctggaaattctgctccagaaatgggagaacggtgagtgcgcccagaagaagatcatcgcagagaagaccaaaattccagcagtattcaaaatcgacgcattgaacgaaaataaggtgctcgtactggacactgattataagaagtatctccttttctgtatggagaactcagcagagcctgaacagagtcttgcctgccaatgccttgttcgtaccccagaggtagatgatgaagctctggaaaagttcgataaggcccttaaggctctgcctatgcacattaggctttctttcaatccaactcaacttgaggaacaatgtcacatttaa

SEQ ID NO: 654 - protein, 958 aa, synthetic construct
  REGION 1..958: note = fusion protein (OBC-T4:OBC-T3:OBC-T2:OKC1-T:OLG1)
RELEELNVPGEIVESLSSSEESITRINKKIEKFQSEEQQQTEDELQDKIHPFAQTQSLVYPFPGPIPNSLPQNIPPLTQTPVVVPPFLQPEVMGVSKVKEAMAPKHKEMPFPKYPVEPFTESQSLTLTDVENLHLPLPLLQSWMHQPHQPLPPTVMFPPQSVLSLSQSKVLPVPQKAVPYPQRDMPIQAFLLYQEPVLGPVRGPFPIIVRELEELNVPGEIVESLSSSEESITRINKKIEKFQSEEQQQTEDELQDKIHPFAQTQSLVYPFPGPIPNSLPQNIPPLTQTPVVVPPFLQPEVMGVSKVKEAMAPKHKEMPFPKYPVEPFTESQSLTLTDVENLHLPLPLLQSWMHQPHQPLPPTVMFPPQSVLSLSQSKVLPVPQKAVPYPQRDMPIQAFLLYQEPVLGPVRGPFPIIVRELEELNVPGEIVESLSSSEESITRINKKIEKFQSEEQQQTEDELQDKIHPFAQTQSLVYPFPGPIPNSLPQNIPPLTQTPVVVPPFLQPEVMGVSKVKEAMAPKHKEMPFPKYPVEPFTESQSLTLTDVENLHLPLPLLQSWMHQPHQPLPPTVMFPPQSVLSLSQSKVLPVPQKAVPYPQRDMPIQAFLLYQEPVLGPVRGPFPIIVQEQNQEQPIRCEKDERFFSDKIAKYIPIQYVLSRYPSYGLNYYQQKPVALINNQFLPYPYYAKPAAVRSPAQILQWQVLSNTVPAKSCQAQPTTMARHPHPHLSFMAIPPKKNQDKTEIPTINTIASGEPTSTPTTEAVESTVATLEDSPEVIESPPEINTVQVTSTAVLIVTQTMKGLDIQKVAGTWYSLAMAASDISLLDAQSAPLRVYVEELKPTPEGDLEILLQKWENGECAQKKIIAEKTKIPAVFKIDALNENKVLVLDTDYKKYLLFCMENSAEPEQSLACQCLVRTPEVDDEALEKFDKALKALPMHIRLSFNPTQLEEQCHI

SEQ ID NO: 655 - DNA, 3504 bp, synthetic construct
  misc_feature 1..3504: note = fusion protein (OBC-T5:OBC-T4:OBC-T3:OBC-T2:OKC1-T:OLG1)
  source 1..3504: mol_type = other DNA
agggagcttgaggagttgaatgttcccggggaaatagtagaatccctgtcatcaagtgaagaaagcataacacgaatcaacaagaagattgagaaatttcagtctgaagagcagcaacaaactgaagatgaacttcaagataaaattcatccatttgctcaaacacagtctctagtgtacccattccccggccctatacccaacagtttaccccaaaatattcctccattaacccaaaccccggtagttgttccacccttccttcagcctgaggtcatgggtgtttccaaagtgaaggaggcaatggctccaaaacacaaggaaatgccttttccaaagtatccggttgagcctttcacagagtctcagtcgcttacgctcactgatgtggaaaatttacatctcccactgcctttgttgcaatcatggatgcatcaacctcaccagcccttgccaccaactgtcatgtttcctcctcaatcagttttgagcctctctcagagtaaggttctgcctgtgccacagaaagccgtgccttatcctcagagagacatgccaattcaagcatttcttctttaccaagaacctgttttgggaccagtacgtggaccgttcccaatcattgtcagggagctcgaggagttgaacgtgcctggcgagattgtagagtcattgagctctagtgaggagagtataacaaggatcaataaaaagattgaaaaatttcaaagcgaagagcagcaacaaacagaagatgaactgcaagacaaaattcatccttttgctcagacacagagcttggtgtatcccttcccagggccaattcccaatagtctgccccaaaacatccctcccttgacccaaacccccgtagtagtacctccattcttgcagcctgaagtgatgggggtgagtaaagtgaaggaggcaatggcccctaagcataaagagatgccattccctaaatatcccgttgagccattcaccgaatcacaatccttgacacttactgatgtcgagaatttgcacttgccactgcccttgctccaaagctggatgcaccaaccacaccaacctctgcctcccacagtgatgttcccaccccaatccgtcttgtctctgtcccagtcaaaggtgttgcctgttcctcagaaagcagttccctatccccaacgcgatatgcccatccaggcttttctcttgtatcaagaaccagtgctcggtcctgtcagaggccccttccccattatcgtgagggaactcgaggaacttaacgttccaggtgagatcgtcgagtccctctcatcttccgaagagtccattaccaggatcaacaagaagatcgagaagttccagtccgaggaacaacagcaaaccgaggatgagcttcaggacaagattcacccattcgctcagacccagtctctcgtgtatccatttccagggccaattccaaacagcctgccacagaacattccaccacttactcagaccccagttgtggtgccaccattccttcaaccagaggttatgggagtgtccaaggtgaaagaagccatggcaccaaagcacaaagagatgccctttccaaagtaccccgttgagccattcactgagtctcagtctcttaccctcaccgacgttgagaaccttcaccttccacttccattgctccagtcttggatgcatcaaccacatcagccacttccaccaaccgttatgttcccacctcagtccgtgcttagcctctctcagtctaaggttttgccagtgcctcagaaggccgttccatatccacaaagggatatgccaatccaggccttcttgctctaccaagagccagttcttggaccagtgagaggcccatttccaatcattgtgcgcgaactggaagagttgaacgtaccaggagagattgtagaatcactgagctcctcagaggagtctattactcgtatcaacaagaagatagagaagttccaatccgaggagcaacaacaaacagaggacgaattgcaggacaagatacatcctttcgcacagacccagagcctcgtctatccctttccaggtccaatccctaactctctcccccagaatatcccacccttgactcagactcccgtggtcgtaccccctttcttgcaacccgaggtgatgggggtttctaaagtcaaagaggctatggctcctaaacataaggaaatgccttttcccaaatatccagtggagccattcactgagagccagtctctgacacttacagatgtggaaaacttgcacctgcccttgccacttttgcagtcctggatgcaccaaccacatcaacccttgccccccacagtgatgtttcctccacaatcagttcttagtctctcccaaagcaaagtccttccagtgcctcagaaggccgtcccatacccccagagagatatgccaatacaggcattcttgctttaccaggaaccagtgctcggtcctgtacgtggcccattccctatcatagtgcaagagcagaatcaagagcagccaatccgttgtgagaaggacgagaggttcttctcagacaagatcgccaaatatatacccatacaatatgtactctcacgctaccctagctacgggcttaactactatcagcaaaaacctgtagcactgataaataaccagtttctcccctatccctattatgctaaacctgccgccgtgaggagtccagcacaaatacttcagtggcaagtgctcagtaacaccgtgccagcaaaaagctgccaggctcagcccaccacaatggcccgtcatccccatcctcaccttagcttcatggcaatcccaccaaagaagaatcaagacaagaccgaaatacctaccatcaacacaattgcatctggagagcctaccagtacaccaacaactgaggcagtagagtctactgttgctacccttgaggacagccccgaggttatagagtccccacctgagataaataccgtgcaggtgacaagtaccgccgtattgatcgtaacacagactatgaagggtcttgatatacagaaggtggccgggacttggtacagtttggcaatggccgcatccgacatctccttgttggacgcacaatcagccccattgcgtgtgtacgtagaagagcttaaaccaactcccgagggggatctggaaattctgctccagaaatgggagaacggtgagtgcgcccagaagaagatcatcgcagagaagaccaaaattccagcagtattcaaaatcgacgcattgaacgaaaataaggtgctcgtactggacactgattataagaagtatctccttttctgtatggagaactcagcagagcctgaacagagtcttgcctgccaatgccttgttcgtaccccagaggtagatgatgaagctctggaaaagttcgataaggcccttaaggctctgcctatgcacattaggctttctttcaatccaactcaacttgaggaacaatgtcacatttaa

SEQ ID NO: 656 - protein, 1167 aa, synthetic construct
  REGION 1..1167: note = fusion protein (OBC-T5:OBC-T4:OBC-T3:OBC-T2:OKC1-T:OLG1)
RELEELNVPGEIVESLSSSEESITRINKKIEKFQSEEQQQTEDELQDKIHPFAQTQSLVYPFPGPIPNSLPQNIPPLTQTPVVVPPFLQPEVMGVSKVKEAMAPKHKEMPFPKYPVEPFTESQSLTLTDVENLHLPLPLLQSWMHQPHQPLPPTVMFPPQSVLSLSQSKVLPVPQKAVPYPQRDMPIQAFLLYQEPVLGPVRGPFPIIVRELEELNVPGEIVESLSSSEESITRINKKIEKFQSEEQQQTEDELQDKIHPFAQTQSLVYPFPGPIPNSLPQNIPPLTQTPVVVPPFLQPEVMGVSKVKEAMAPKHKEMPFPKYPVEPFTESQSLTLTDVENLHLPLPLLQSWMHQPHQPLPPTVMFPPQSVLSLSQSKVLPVPQKAVPYPQRDMPIQAFLLYQEPVLGPVRGPFPIIVRELEELNVPGEIVESLSSSEESITRINKKIEKFQSEEQQQTEDELQDKIHPFAQTQSLVYPFPGPIPNSLPQNIPPLTQTPVVVPPFLQPEVMGVSKVKEAMAPKHKEMPFPKYPVEPFTESQSLTLTDVENLHLPLPLLQSWMHQPHQPLPPTVMFPPQSVLSLSQSKVLPVPQKAVPYPQRDMPIQAFLLYQEPVLGPVRGPFPIIVRELEELNVPGEIVESLSSSEESITRINKKIEKFQSEEQQQTEDELQDKIHPFAQTQSLVYPFPGPIPNSLPQNIPPLTQTPVVVPPFLQPEVMGVSKVKEAMAPKHKEMPFPKYPVEPFTESQSLTLTDVENLHLPLPLLQSWMHQPHQPLPPTVMFPPQSVLSLSQSKVLPVPQKAVPYPQRDMPIQAFLLYQEPVLGPVRGPFPIIVQEQNQEQPIRCEKDERFFSDKIAKYIPIQYVLSRYPSYGLNYYQQKPVALINNQFLPYPYYAKPAAVRSPAQILQWQVLSNTVPAKSCQAQPTTMARHPHPHLSFMAIPPKKNQDKTEIPTINTIASGEPTSTPTTEAVESTVATLEDSPEVIESPPEINTVQVTSTAVLIVTQTMKGLDIQKVAGTWYSLAMAASDISLLDAQSAPLRVYVEELKPTPEGDLEILLQKWENGECAQKKIIAEKTKIPAVFKIDALNENKVLVLDTDYKKYLLFCMENSAEPEQSLACQCLVRTPEVDDEALEKFDKALKALPMHIRLSFNPTQLEEQCHI

SEQ ID NO: 657 - DNA, 2997 bp, synthetic construct
  misc_feature 1..2997: note = fusion protein (OBC-T5:OBC-T4:OBC-T3:OBC-T2:OLG1)
  source 1..2997: mol_type = other DNA
agggagcttgaggagttgaatgttcccggggaaatagtagaatccctgtcatcaagtgaagaaagcataacacgaatcaacaagaagattgagaaatttcagtctgaagagcagcaacaaactgaagatgaacttcaagataaaattcatccatttgctcaaacacagtctctagtgtacccattccccggccctatacccaacagtttaccccaaaatattcctccattaacccaaaccccggtagttgttccacccttccttcagcctgaggtcatgggtgtttccaaagtgaaggaggcaatggctccaaaacacaaggaaatgccttttccaaagtatccggttgagcctttcacagagtctcagtcgcttacgctcactgatgtggaaaatttacatctcccactgcctttgttgcaatcatggatgcatcaacctcaccagcccttgccaccaactgtcatgtttcctcctcaatcagttttgagcctctctcagagtaaggttctgcctgtgccacagaaagccgtgccttatcctcagagagacatgccaattcaagcatttcttctttaccaagaacctgttttgggaccagtacgtggaccgttcccaatcattgtcagggagctcgaggagttgaacgtgcctggcgagattgtagagtcattgagctctagtgaggagagtataacaaggatcaataaaaagattgaaaaatttcaaagcgaagagcagcaacaaacagaagatgaactgcaagacaaaattcatccttttgctcagacacagagcttggtgtatcccttcccagggccaattcccaatagtctgccccaaaacatccctcccttgacccaaacccccgtagtagtacctccattcttgcagcctgaagtgatgggggtgagtaaagtgaaggaggcaatggcccctaagcataaagagatgccattccctaaatatcccgttgagccattcaccgaatcacaatccttgacacttactgatgtcgagaatttgcacttgccactgcccttgctccaaagctggatgcaccaaccacaccaacctctgcctcccacagtgatgttcccaccccaatccgtcttgtctctgtcccagtcaaaggtgttgcctgttcctcagaaagcagttccctatccccaacgcgatatgcccatccaggcttttctcttgtatcaagaaccagtgctcggtcctgtcagaggccccttccccattatcgtgagggaactcgaggaacttaacgttccaggtgagatcgtcgagtccctctcatcttccgaagagtccattaccaggatcaacaagaagatcgagaagttccagtccgaggaacaacagcaaaccgaggatgagcttcaggacaagattcacccattcgctcagacccagtctctcgtgtatccatttccagggccaattccaaacagcctgccacagaacattccaccacttactcagaccccagttgtggtgccaccattccttcaaccagaggttatgggagtgtccaaggtgaaagaagccatggcaccaaagcacaaagagatgccctttccaaagtaccccgttgagccattcactgagtctcagtctcttaccctcaccgacgttgagaaccttcaccttccacttccattgctccagtcttggatgcatcaaccacatcagccacttccaccaaccgttatgttcccacctcagtccgtgcttagcctctctcagtctaaggttttgccagtgcctcagaaggccgttccatatccacaaagggatatgccaatccaggccttcttgctctaccaagagccagttcttggaccagtgagaggcccatttccaatcattgtgcgcgaactggaagagttgaacgtaccaggagagattgtagaatcactgagctcctcagaggagtctattactcgtatcaacaagaagatagagaagttccaatccgaggagcaacaacaaacagaggacgaattgcaggacaagatacatcctttcgcacagacccagagcctcgtctatccctttccaggtccaatccctaactctctcccccagaatatcccacccttgactcagactcccgtggtcgtaccccctttcttgcaacccgaggtgatgggggtttctaaagtcaaagaggctatggctcctaaacataaggaaatgccttttcccaaatatccagtggagccattcactgagagccagtctctgacacttacagatgtggaaaacttgcacctgcccttgccacttttgcagtcctggatgcaccaaccacatcaacccttgccccccacagtgatgtttcctccacaatcagttcttagtctctcccaaagcaaagtccttccagtgcctcagaaggccgtcccatacccccagagagatatgccaatacaggcattcttgctttaccaggaaccagtgctcggtcctgtacgtggcccattccctatcatagtgttgatcgtaacacagactatgaagggtcttgatatacagaaggtggccgggacttggtacagtttggcaatggccgcatccgacatctccttgttggacgcacaatcagccccattgcgtgtgtacgtagaagagcttaaaccaactcccgagggggatctggaaattctgctccagaaatgggagaacggtgagtgcgcccagaagaagatcatcgcagagaagaccaaaattccagcagtattcaaaatcgacgcattgaacgaaaataaggtgctcgtactggacactgattataagaagtatctccttttctgtatggagaactcagcagagcctgaacagagtcttgcctgccaatgccttgttcgtaccccagaggtagatgatgaagctctggaaaagttcgataaggcccttaaggctctgcctatgcacattaggctttctttcaatccaactcaacttgaggaacaatgtcacatttaa

SEQ ID NO: 658 - protein, 998 aa, synthetic construct
  REGION 1..998: note = fusion protein (OBC-T5:OBC-T4:OBC-T3:OBC-T2:OLG1)
RELEELNVPGEIVESLSSSEESITRINKKIEKFQSEEQQQTEDELQDKIHPFAQTQSLVYPFPGPIPNSLPQNIPPLTQTPVVVPPFLQPEVMGVSKVKEAMAPKHKEMPFPKYPVEPFTESQSLTLTDVENLHLPLPLLQSWMHQPHQPLPPTVMFPPQSVLSLSQSKVLPVPQKAVPYPQRDMPIQAFLLYQEPVLGPVRGPFPIIVRELEELNVPGEIVESLSSSEESITRINKKIEKFQSEEQQQTEDELQDKIHPFAQTQSLVYPFPGPIPNSLPQNIPPLTQTPVVVPPFLQPEVMGVSKVKEAMAPKHKEMPFPKYPVEPFTESQSLTLTDVENLHLPLPLLQSWMHQPHQPLPPTVMFPPQSVLSLSQSKVLPVPQKAVPYPQRDMPIQAFLLYQEPVLGPVRGPFPIIVRELEELNVPGEIVESLSSSEESITRINKKIEKFQSEEQQQTEDELQDKIHPFAQTQSLVYPFPGPIPNSLPQNIPPLTQTPVVVPPFLQPEVMGVSKVKEAMAPKHKEMPFPKYPVEPFTESQSLTLTDVENLHLPLPLLQSWMHQPHQPLPPTVMFPPQSVLSLSQSKVLPVPQKAVPYPQRDMPIQAFLLYQEPVLGPVRGPFPIIVRELEELNVPGEIVESLSSSEESITRINKKIEKFQSEEQQQTEDELQDKIHPFAQTQSLVYPFPGPIPNSLPQNIPPLTQTPVVVPPFLQPEVMGVSKVKEAMAPKHKEMPFPKYPVEPFTESQSLTLTDVENLHLPLPLLQSWMHQPHQPLPPTVMFPPQSVLSLSQSKVLPVPQKAVPYPQRDMPIQAFLLYQEPVLGPVRGPFPIIVLIVTQTMKGLDIQKVAGTWYSLAMAASDISLLDAQSAPLRVYVEELKPTPEGDLEILLQKWENGECAQKKIIAEKTKIPAVFKIDALNENKVLVLDTDYKKYLLFCMENSAEPEQSLACQCLVRTPEVDDEALEKFDKALKALPMHIRLSFNPTQLEEQCHI

SEQ ID NO: 659 - DNA, 2508 bp, synthetic construct
  misc_feature 1..2508: note = fusion protein (OBC-T5:OBC-T4:OBC-T3:OBC-T2)
  source 1..2508: mol_type = other DNA
agggagcttgaggagttgaatgttcccggggaaatagtagaatccctgtcatcaagtgaagaaagcataacacgaatcaacaagaagattgagaaatttcagtctgaagagcagcaacaaactgaagatgaacttcaagataaaattcatccatttgctcaaacacagtctctagtgtacccattccccggccctatacccaacagtttaccccaaaatattcctccattaacccaaaccccggtagttgttccacccttccttcagcctgaggtcatgggtgtttccaaagtgaaggaggcaatggctccaaaacacaaggaaatgccttttccaaagtatccggttgagcctttcacagagtctcagtcgcttacgctcactgatgtggaaaatttacatctcccactgcctttgttgcaatcatggatgcatcaacctcaccagcccttgccaccaactgtcatgtttcctcctcaatcagttttgagcctctctcagagtaaggttctgcctgtgccacagaaagccgtgccttatcctcagagagacatgccaattcaagcatttcttctttaccaagaacctgttttgggaccagtacgtggaccgttcccaatcattgtcagggagctcgaggagttgaacgtgcctggcgagattgtagagtcattgagctctagtgaggagagtataacaaggatcaataaaaagattgaaaaatttcaaagcgaagagcagcaacaaacagaagatgaactgcaagacaaaattcatccttttgctcagacacagagcttggtgtatcccttcccagggccaattcccaatagtctgccccaaaacatccctcccttgacccaaacccccgtagtagtacctccattcttgcagcctgaagtgatgggggtgagtaaagtgaaggaggcaatggcccctaagcataaagagatgccattccctaaatatcccgttgagccattcaccgaatcacaatccttgacacttactgatgtcgagaatttgcacttgccactgcccttgctccaaagctggatgcaccaaccacaccaacctctgcctcccacagtgatgttcccaccccaatccgtcttgtctctgtcccagtcaaaggtgttgcctgttcctcagaaagcagttccctatccccaacgcgatatgcccatccaggcttttctcttgtatcaagaaccagtgctcggtcctgtcagaggccccttccccattatcgtgagggaactcgaggaacttaacgttccaggtgagatcgtcgagtccctctcatcttccgaagagtccattaccaggatcaacaagaagatcgagaagttccagtccgaggaacaacagcaaaccgaggatgagcttcaggacaagattcacccattcgctcagacccagtctctcgtgtatccatttccagggccaattccaaacagcctgccacagaacattccaccacttactcagaccccagttgtggtgccaccattccttcaaccagaggttatgggagtgtccaaggtgaaagaagccatggcaccaaagcacaaagagatgccctttccaaagtaccccgttgagccattcactgagtctcagtctcttaccctcaccgacgttgagaaccttcaccttccacttccattgctccagtcttggatgcatcaaccacatcagccacttccaccaaccgttatgttcccacctcagtccgtgcttagcctctctcagtctaaggttttgccagtgcctcagaaggccgttccatatccacaaagggatatgccaatccaggccttcttgctctaccaagagccagttcttggaccagtgagaggcccatttccaatcattgtgcgcgaactggaagagttgaacgtaccaggagagattgtagaatcactgagctcctcagaggagtctattactcgtatcaacaagaagatagagaagttccaatccgaggagcaacaacaaacagaggacgaattgcaggacaagatacatcctttcgcacagacccagagcctcgtctatccctttccaggtccaatccctaactctctcccccagaatatcccacccttgactcagactcccgtggtcgtaccccctttcttgcaacccgaggtgatgggggtttctaaagtcaaagaggctatggctcctaaacataaggaaatgccttttcccaaatatccagtggagccattcactgagagccagtctctgacacttacagatgtggaaaacttgcacctgcccttgccacttttgcagtcctggatgcaccaaccacatcaacccttgccccccacagtgatgtttcctccacaatcagttcttagtctctcccaaagcaaagtccttccagtgcctcagaaggccgtcccatacccccagagagatatgccaatacaggcattcttgctttaccaggaaccagtgctcggtcctgtacgtggcccattccctatcatagtg

SEQ ID NO: 660 - protein, 836 aa, synthetic construct
  REGION 1..836: note = fusion protein (OBC-T5:OBC-T4:OBC-T3:OBC-T2)
RELEELNVPGEIVESLSSSEESITRINKKIEKFQSEEQQQTEDELQDKIHPFAQTQSLVYPFPGPIPNSLPQNIPPLTQTPVVVPPFLQPEVMGVSKVKEAMAPKHKEMPFPKYPVEPFTESQSLTLTDVENLHLPLPLLQSWMHQPHQPLPPTVMFPPQSVLSLSQSKVLPVPQKAVPYPQRDMPIQAFLLYQEPVLGPVRGPFPIIVRELEELNVPGEIVESLSSSEESITRINKKIEKFQSEEQQQTEDELQDKIHPFAQTQSLVYPFPGPIPNSLPQNIPPLTQTPVVVPPFLQPEVMGVSKVKEAMAPKHKEMPFPKYPVEPFTESQSLTLTDVENLHLPLPLLQSWMHQPHQPLPPTVMFPPQSVLSLSQSKVLPVPQKAVPYPQRDMPIQAFLLYQEPVLGPVRGPFPIIVRELEELNVPGEIVESLSSSEESITRINKKIEKFQSEEQQQTEDELQDKIHPFAQTQSLVYPFPGPIPNSLPQNIPPLTQTPVVVPPFLQPEVMGVSKVKEAMAPKHKEMPFPKYPVEPFTESQSLTLTDVENLHLPLPLLQSWMHQPHQPLPPTVMFPPQSVLSLSQSKVLPVPQKAVPYPQRDMPIQAFLLYQEPVLGPVRGPFPIIVRELEELNVPGEIVESLSSSEESITRINKKIEKFQSEEQQQTEDELQDKIHPFAQTQSLVYPFPGPIPNSLPQNIPPLTQTPVVVPPFLQPEVMGVSKVKEAMAPKHKEMPFPKYPVEPFTESQSLTLTDVENLHLPLPLLQSWMHQPHQPLPPTVMFPPQSVLSLSQSKVLPVPQKAVPYPQRDMPIQAFLLYQEPVLGPVRGPFPIIV

SEQ ID NO: 661 - DNA, 3021 bp, synthetic construct
  misc_feature 1..3021: note = fusion protein (OBC-T5:FM:OBC-T4:FM:OBC-T3:FM:OBC-T2:FM:OLG1)
  source 1..3021: mol_type = other DNA
agggagcttgaggagttgaatgttcccggggaaatagtagaatccctgtcatcaagtgaagaaagcataacacgaatcaacaagaagattgagaaatttcagtctgaagagcagcaacaaactgaagatgaacttcaagataaaattcatccatttgctcaaacacagtctctagtgtacccattccccggccctatacccaacagtttaccccaaaatattcctccattaacccaaaccccggtagttgttccacccttccttcagcctgaggtcatgggtgtttccaaagtgaaggaggcaatggctccaaaacacaaggaaatgccttttccaaagtatccggttgagcctttcacagagtctcagtcgcttacgctcactgatgtggaaaatttacatctcccactgcctttgttgcaatcatggatgcatcaacctcaccagcccttgccaccaactgtcatgtttcctcctcaatcagttttgagcctctctcagagtaaggttctgcctgtgccacagaaagccgtgccttatcctcagagagacatgccaattcaagcatttcttctttaccaagaacctgttttgggaccagtacgtggaccgttcccaatcattgtcttcatgagggagctcgaggagttgaacgtgcctggcgagattgtagagtcattgagctctagtgaggagagtataacaaggatcaataaaaagattgaaaaatttcaaagcgaagagcagcaacaaacagaagatgaactgcaagacaaaattcatccttttgctcagacacagagcttggtgtatcccttcccagggccaattcccaatagtctgccccaaaacatccctcccttgacccaaacccccgtagtagtacctccattcttgcagcctgaagtgatgggggtgagtaaagtgaaggaggcaatggcccctaagcataaagagatgccattccctaaatatcccgttgagccattcaccgaatcacaatccttgacacttactgatgtcgagaatttgcacttgccactgcccttgctccaaagctggatgcaccaaccacaccaacctctgcctcccacagtgatgttcccaccccaatccgtcttgtctctgtcccagtcaaaggtgttgcctgttcctcagaaagcagttccctatccccaacgcgatatgcccatccaggcttttctcttgtatcaagaaccagtgctcggtcctgtcagaggccccttccccattatcgtgttcatgagggaactcgaggaacttaacgttccaggtgagatcgtcgagtccctctcatcttccgaagagtccattaccaggatcaacaagaagatcgagaagttccagtccgaggaacaacagcaaaccgaggatgagcttcaggacaagattcacccattcgctcagacccagtctctcgtgtatccatttccagggccaattccaaacagcctgccacagaacattccaccacttactcagaccccagttgtggtgccaccattccttcaaccagaggttatgggagtgtccaaggtgaaagaagccatggcaccaaagcacaaagagatgccctttccaaagtaccccgttgagccattcactgagtctcagtctcttaccctcaccgacgttgagaaccttcaccttccacttccattgctccagtcttggatgcatcaaccacatcagccacttccaccaaccgttatgttcccacctcagtccgtgcttagcctctctcagtctaaggttttgccagtgcctcagaaggccgttccatatccacaaagggatatgccaatccaggccttcttgctctaccaagagccagttcttggaccagtgagaggcccatttccaatcattgtgttcatgcgcgaactggaagagttgaacgtaccaggagagattgtagaatcactgagctcctcagaggagtctattactcgtatcaacaagaagatagagaagttccaatccgaggagcaacaacaaacagaggacgaattgcaggacaagatacatcctttcgcacagacccagagcctcgtctatccctttccaggtccaatccctaactctctcccccagaatatcccacccttgactcagactcccgtggtcgtaccccctttcttgcaacccgaggtgatgggggtttctaaagtcaaagaggctatggctcctaaacataaggaaatgccttttcccaaatatccagtggagccattcactgagagccagtctctgacacttacagatgtggaaaacttgcacctgcccttgccacttttgcagtcctggatgcaccaaccacatcaacccttgccccccacagtgatgtttcctccacaatcagttcttagtctctcccaaagcaaagtccttccagtgcctcagaaggccgtcccatacccccagagagatatgccaatacaggcattcttgctttaccaggaaccagtgctcggtcctgtacgtggcccattccctatcatagtgttcatgttgatcgtaacacagactatgaagggtcttgatatacagaaggtggccgggacttggtacagtttggcaatggccgcatccgacatctccttgttggacgcacaatcagccccattgcgtgtgtacgtagaagagcttaaaccaactcccgagggggatctggaaattctgctccagaaatgggagaacggtgagtgcgcccagaagaagatcatcgcagagaagaccaaaattccagcagtattcaaaatcgacgcattgaacgaaaataaggtgctcgtactggacactgattataagaagtatctccttttctgtatggagaactcagcagagcctgaacagagtcttgcctgccaatgccttgttcgtaccccagaggtagatgatgaagctctggaaaagttcgataaggcccttaaggctctgcctatgcacattaggctttctttcaatccaactcaacttgaggaacaatgtcacatttaa

SEQ ID NO: 662 - protein, 1006 aa, synthetic construct
  REGION 1..1006: note = fusion protein (OBC-T5:FM:OBC-T4:FM:OBC-T3:FM:OBC-T2:FM:OLG1)
RELEELNVPGEIVESLSSSEESITRINKKIEKFQSEEQQQTEDELQDKIHPFAQTQSLVYPFPGPIPNSLPQNIPPLTQTPVVVPPFLQPEVMGVSKVKEAMAPKHKEMPFPKYPVEPFTESQSLTLTDVENLHLPLPLLQSWMHQPHQPLPPTVMFPPQSVLSLSQSKVLPVPQKAVPYPQRDMPIQAFLLYQEPVLGPVRGPFPIIVFMRELEELNVPGEIVESLSSSEESITRINKKIEKFQSEEQQQTEDELQDKIHPFAQTQSLVYPFPGPIPNSLPQNIPPLTQTPVVVPPFLQPEVMGVSKVKEAMAPKHKEMPFPKYPVEPFTESQSLTLTDVENLHLPLPLLQSWMHQPHQPLPPTVMFPPQSVLSLSQSKVLPVPQKAVPYPQRDMPIQAFLLYQEPVLGPVRGPFPIIVFMRELEELNVPGEIVESLSSSEESITRINKKIEKFQSEEQQQTEDELQDKIHPFAQTQSLVYPFPGPIPNSLPQNIPPLTQTPVVVPPFLQPEVMGVSKVKEAMAPKHKEMPFPKYPVEPFTESQSLTLTDVENLHLPLPLLQSWMHQPHQPLPPTVMFPPQSVLSLSQSKVLPVPQKAVPYPQRDMPIQAFLLYQEPVLGPVRGPFPIIVFMRELEELNVPGEIVESLSSSEESITRINKKIEKFQSEEQQQTEDELQDKIHPFAQTQSLVYPFPGPIPNSLPQNIPPLTQTPVVVPPFLQPEVMGVSKVKEAMAPKHKEMPFPKYPVEPFTESQSLTLTDVENLHLPLPLLQSWMHQPHQPLPPTVMFPPQSVLSLSQSKVLPVPQKAVPYPQRDMPIQAFLLYQEPVLGPVRGPFPIIVFMLIVTQTMKGLDIQKVAGTWYSLAMAASDISLLDAQSAPLRVYVEELKPTPEGDLEILLQKWENGECAQKKIIAEKTKIPAVFKIDALNENKVLVLDTDYKKYLLFCMENSAEPEQSLACQCLVRTPEVDDEALEKFDKALKALPMHIRLSFNPTQLEEQCHI

SEQ ID NO: 663 - DNA, 2529 bp, synthetic construct
  misc_feature 1..2529: note = fusion protein (OBC-T5:FM:OBC-T4:FM:OBC-T3:FM:OBC-T2)
  source 1..2529: mol_type = other DNA
agggagcttgaggagttgaatgttcccggggaaatagtagaatccctgtcatcaagtgaagaaagcataacacgaatcaacaagaagattgagaaatttcagtctgaagagcagcaacaaactgaagatgaacttcaagataaaattcatccatttgctcaaacacagtctctagtgtacccattccccggccctatacccaacagtttaccccaaaatattcctccattaacccaaaccccggtagttgttccacccttccttcagcctgaggtcatgggtgtttccaaagtgaaggaggcaatggctccaaaacacaaggaaatgccttttccaaagtatccggttgagcctttcacagagtctcagtcgcttacgctcactgatgtggaaaatttacatctcccactgcctttgttgcaatcatggatgcatcaacctcaccagcccttgccaccaactgtcatgtttcctcctcaatcagttttgagcctctctcagagtaaggttctgcctgtgccacagaaagccgtgccttatcctcagagagacatgccaattcaagcatttcttctttaccaagaacctgttttgggaccagtacgtggaccgttcccaatcattgtcttcatgagggagctcgaggagttgaacgtgcctggcgagattgtagagtcattgagctctagtgaggagagtataacaaggatcaataaaaagattgaaaaatttcaaagcgaagagcagcaacaaacagaagatgaactgcaagacaaaattcatccttttgctcagacacagagcttggtgtatcccttcccagggccaattcccaatagtctgccccaaaacatccctcccttgacccaaacccccgtagtagtacctccattcttgcagcctgaagtgatgggggtgagtaaagtgaaggaggcaatggcccctaagcataaagagatgccattccctaaatatcccgttgagccattcaccgaatcacaatccttgacacttactgatgtcgagaatttgcacttgccactgcccttgctccaaagctggatgcaccaaccacaccaacctctgcctcccacagtgatgttcccaccccaatccgtcttgtctctgtcccagtcaaaggtgttgcctgttcctcagaaagcagttccctatccccaacgcgatatgcccatccaggcttttctcttgtatcaagaaccagtgctcggtcctgtcagaggccccttccccattatcgtgttcatgagggaactcgaggaacttaacgttccaggtgagatcgtcgagtccctctcatcttccgaagagtccattaccaggatcaacaagaagatcgagaagttccagtccgaggaacaacagcaaaccgaggatgagcttcaggacaagattcacccattcgctcagacccagtctctcgtgtatccatttccagggccaattccaaacagcctgccacagaacattccaccacttactcagaccccagttgtggtgccaccattccttcaaccagaggttatgggagtgtccaaggtgaaagaagccatggcaccaaagcacaaagagatgccctttccaaagtaccccgttgagccattcactgagtctcagtctcttaccctcaccgacgttgagaaccttcaccttccacttccattgctccagtcttggatgcatcaaccacatcagccacttccaccaaccgttatgttcccacctcagtccgtgcttagcctctctcagtctaaggttttgccagtgcctcagaaggccgttccatatccacaaagggatatgccaatccaggccttcttgctctaccaagagccagttcttggaccagtgagaggcccatttccaatcattgtgttcatgcgcgaactggaagagttgaacgtaccaggagagattgtagaatcactgagctcctcagaggagtctattactcgtatcaacaagaagatagagaagttccaatccgaggagcaacaacaaacagaggacgaattgcaggacaagatacatcctttcgcacagacccagagcctcgtctatccctttccaggtccaatccctaactctctcccccagaatatcccacccttgactcagactcccgtggtcgtaccccctttcttgcaacccgaggtgatgggggtttctaaagtcaaagaggctatggctcctaaacataaggaaatgccttttcccaaatatccagtggagccattcactgagagccagtctctgacacttacagatgtggaaaacttgcacctgcccttgccacttttgcagtcctggatgcaccaaccacatcaacccttgccccccacagtgatgtttcctccacaatcagttcttagtctctcccaaagcaaagtccttccagtgcctcagaaggccgtcccatacccccagagagatatgccaatacaggcattcttgctttaccaggaaccagtgctcggtcctgtacgtggcccattccctatcatagtgtaa

SEQ ID NO: 664 - protein, 842 aa, synthetic construct
  REGION 1..842: note = fusion protein (OBC-T5:FM:OBC-T4:FM:OBC-T3:FM:OBC-T2)
RELEELNVPGEIVESLSSSEESITRINKKIEKFQSEEQQQTEDELQDKIHPFAQTQSLVYPFPGPIPNSLPQNIPPLTQTPVVVPPFLQPEVMGVSKVKEAMAPKHKEMPFPKYPVEPFTESQSLTLTDVENLHLPLPLLQSWMHQPHQPLPPTVMFPPQSVLSLSQSKVLPVPQKAVPYPQRDMPIQAFLLYQEPVLGPVRGPFPIIVFMRELEELNVPGEIVESLSSSEESITRINKKIEKFQSEEQQQTEDELQDKIHPFAQTQSLVYPFPGPIPNSLPQNIPPLTQTPVVVPPFLQPEVMGVSKVKEAMAPKHKEMPFPKYPVEPFTESQSLTLTDVENLHLPLPLLQSWMHQPHQPLPPTVMFPPQSVLSLSQSKVLPVPQKAVPYPQRDMPIQAFLLYQEPVLGPVRGPFPIIVFMRELEELNVPGEIVESLSSSEESITRINKKIEKFQSEEQQQTEDELQDKIHPFAQTQSLVYPFPGPIPNSLPQNIPPLTQTPVVVPPFLQPEVMGVSKVKEAMAPKHKEMPFPKYPVEPFTESQSLTLTDVENLHLPLPLLQSWMHQPHQPLPPTVMFPPQSVLSLSQSKVLPVPQKAVPYPQRDMPIQAFLLYQEPVLGPVRGPFPIIVFMRELEELNVPGEIVESLSSSEESITRINKKIEKFQSEEQQQTEDELQDKIHPFAQTQSLVYPFPGPIPNSLPQNIPPLTQTPVVVPPFLQPEVMGVSKVKEAMAPKHKEMPFPKYPVEPFTESQSLTLTDVENLHLPLPLLQSWMHQPHQPLPPTVMFPPQSVLSLSQSKVLPVPQKAVPYPQRDMPIQAFLLYQEPVLGPVRGPFPIIV

SEQ ID NO: 665 - protein, 16 aa, synthetic construct
  REGION 1..16: note = Protease cleavage site
RHPHPHLSFMAIPPKK

SEQ ID NO: 666 - protein, 14 aa, synthetic construct
  REGION 1..14: note = Protease cleavage site
HPHPHLSFMAIPPK

SEQ ID NO: 667 - protein, 10 aa, synthetic construct
  REGION 1..10: note = Protease cleavage site
RHPHPHLSFM

SEQ ID NO: 668 - protein, 16 aa, synthetic construct
  REGION 1..16: note = Protease cleavage site
EDFLQKQQYGISSKFR

SEQ ID NO: 669 - protein, 16 aa, synthetic construct
  REGION 1..16: note = Protease cleavage site
RHPHPHLSFMAIPPKK

SEQ ID NO: 670 - protein, 16 aa, synthetic construct
  REGION 1..16: note = Protease cleavage site
HHPHPHLSFMAIPPKK

SEQ ID NO: 671 - protein, 16 aa, synthetic construct
  REGION 1..16: note = Protease cleavage site
RHPHPRLSFMAIPPKK

SEQ ID NO: 672 - protein, 16 aa, synthetic construct
  REGION 1..16: note = Protease cleavage site
RRPRPHLSFMAIPPKK

SEQ ID NO: 673 - protein, 16 aa, synthetic construct
  REGION 1..16: note = Protease cleavage site
HQTFQHASFIATPPQK

SEQ ID NO: 674 - protein, 16 aa, synthetic construct
  REGION 1..16: note = Protease cleavage site
RRPNLHPSFIAIPPKK

SEQ ID NO: 675 - protein, 16 aa, synthetic construct
  REGION 1..16: note = Protease cleavage site
PYAIPNPSFLAMPTNE

SEQ ID NO: 676 - protein, 16 aa, synthetic construct
  REGION 1..16: note = Protease cleavage site
PHPIPNPSFLAIPTNE

SEQ ID NO: 677 - protein, 16 aa, synthetic construct
  REGION 1..16: note = Protease cleavage site
RHPCPHPSFIAIPPKK

SEQ ID NO: 678 - protein, 16 aa, synthetic construct
  REGION 1..16: note = Protease cleavage site
ARRPPHASFIAIPPKK

SEQ ID NO: 679 - protein, 16 aa, synthetic construct
  REGION 1..16: note = Protease cleavage site
VGRHSHPFFMAILPNK

SEQ ID NO: 680 - protein, 16 aa, synthetic construct
  REGION 1..16: note = Protease cleavage site
RRPRPRPSFIAIPPKK

SEQ ID NO: 681 - protein, 16 aa, synthetic construct
  REGION 1..16: note = Protease cleavage site
  VARIANT 16: note = X can be any naturally occurring amino acid
RHPRPHPSFIAIPPKX

SEQ ID NO: 682 - protein, 16 aa, synthetic construct
  REGION 1..16: note = Protease cleavage site
RHPYRRPSFIAIPPKK

SEQ ID NO: 683 - protein, 16 aa, synthetic construct
  REGION 1..16: note = Protease cleavage site
RHPHLPASFIVIPPKK

SEQ ID NO: 684 - protein, 16 aa, synthetic construct
  REGION 1..16: note = Protease cleavage site
  VARIANT 15: note = X can be any naturally occurring amino acid
CRRRPHPSFLAIPPXK

SEQ ID NO: 685 - protein, 16 aa, synthetic construct
  REGION 1..16: note = Protease cleavage site
HRPNLHPSFIAIPPKK

SEQ ID NO: 686 - protein, 16 aa, synthetic construct
  REGION 1..16: note = Protease cleavage site
HRPQLHPSFIAIPPKK

SEQ ID NO: 687 - protein, 16 aa, synthetic construct
  REGION 1..16: note = Protease cleavage site
HRPHIHPSFIAIPPKK

SEQ ID NO: 688 - protein, 16 aa, synthetic construct
  REGION 1..16: note = Protease cleavage site
HRPHLHPSFIAIPPKK

SEQ ID NO: 689 - protein, 16 aa, synthetic construct
  REGION 1..16: note = Protease cleavage site
HRPHLHPSFIAIPAKK

SEQ ID NO: 690 - protein, 16 aa, synthetic construct
  REGION 1..16: note = Protease cleavage site
HHPHPCPSFLAIPPKK

SEQ ID NO: 691 - protein, 16 aa, synthetic construct
  REGION 1..16: note = Protease cleavage site
HRPHLHPSFTAIPAKK

SEQ ID NO: 692 - protein, 16 aa, synthetic construct
  REGION 1..16: note = Protease cleavage site
HHPHPRPSFTAIPPKK

SEQ ID NO: 693 - protein, 16 aa, synthetic construct
  REGION 1..16: note = Protease cleavage site
HHPHPRPSFLAIPPKK

SEQ ID NO: 694 - protein, 16 aa, synthetic construct
  REGION 1..16: note = Protease cleavage site
HRPHLHPSFIAIPTKK

SEQ ID NO: 695 - protein, 16 aa, synthetic construct
  REGION 1..16: note = Protease cleavage site
HHKYLKPSFIVIPPTK

SEQ ID NO: 696 - protein, 16 aa, synthetic construct
  REGION 1..16: note = Protease cleavage site
RHPRPHPSFIAIPPKK

SEQ ID NO: 697 - protein, 16 aa, synthetic construct
  REGION 1..16: note = Protease cleavage site
YHQAKHPSFMAILSKK

SEQ ID NO: 698 - protein, 16 aa, synthetic construct
  REGION 1..16: note = Protease cleavage site
PHTYLKPPFIVIPPKK

SEQ ID NO: 699 - protein, 16 aa, synthetic construct
  REGION 1..16: note = Protease cleavage site
HRPKLHPSFIAVPPKK

SEQ ID NO: 700 - protein, 16 aa, synthetic construct
  REGION 1..16: note = Protease cleavage site
RRPHPRLSFMAIPPKK

SEQ ID NO: 701 - protein, 8 aa, synthetic construct
  REGION 1..8: note = Protease cleavage site
KPAEFFRL

SEQ ID NO: 702 - protein, 8 aa, synthetic construct
  REGION 1..8: note = Protease cleavage site
KPAEFKRL

SEQ ID NO: 703 - protein, 8 aa, synthetic construct
  REGION 1..8: note = Protease cleavage site
KPAEFERL

SEQ ID NO: 704 - protein, 8 aa, synthetic construct
  REGION 1..8: note = Protease cleavage site
KPAEFTRL

SEQ ID NO: 705 - protein, 8 aa, synthetic construct
  REGION 1..8: note = Protease cleavage site
KPAEFGRL

SEQ ID NO: 706 - protein, 8 aa, synthetic construct
  REGION 1..8: note = Protease cleavage site
KPAEFARL

SEQ ID NO: 707 - protein, 8 aa, synthetic construct
  REGION 1..8: note = Protease cleavage site
KPAEFVRL

SEQ ID NO: 708 - protein, 8 aa, synthetic construct
  REGION 1..8: note = Protease cleavage site
KPAEFLRL

SEQ ID NO: 709 - protein, 8 aa, synthetic construct
  REGION 1..8: note = Protease cleavage site
KPAEFIRL

SEQ ID NO: 710 - protein, 9 aa, synthetic construct
  REGION 1..9: note = Protease cleavage site
HPHLSFMAI

SEQ ID NO: 711 - protein, 9 aa, synthetic construct
  REGION 1..9: note = Protease cleavage site
HPHLSFEAI

SEQ ID NO: 712 - protein, 7 aa, synthetic construct
  REGION 1..7: note = Protease cleavage site
YGIFLRF

SEQ ID NO: 713 - protein, 7 aa, synthetic construct
  REGION 1..7: note = Protease cleavage site
YGIFKRF

SEQ ID NO: 714 - protein, 7 aa, synthetic construct
  REGION 1..7: note = Protease cleavage site
YGAFLRF

SEQ ID NO: 715 - protein, 9 aa, synthetic construct
  REGION 1..9: note = Protease cleavage site
KYSSWYVAL

SEQ ID NO: 716 - protein, 9 aa, synthetic construct
  REGION 1..9: note = Protease cleavage site
KYSSWKVAL

SEQ ID NO: 717 - protein, 9 aa, synthetic construct
  REGION 1..9: note = Protease cleavage site
KYSSWEVAL

SEQ ID NO: 718 - protein, 9 aa, synthetic construct
  REGION 1..9: note = Protease cleavage site
KYSSWLVAL

SEQ ID NO: 719 - protein, 11 aa, synthetic construct
  REGION 1..11: note = Protease cleavage site
RPKPQQFFGLM

SEQ ID NO: 720 - protein, 11 aa, synthetic construct
  REGION 1..11: note = Protease cleavage site
RPKPQQFKGLM

SEQ ID NO: 721 - protein, 10 aa, synthetic construct
  REGION 1..10: note = Protease cleavage site
AFPLEFKREL

SEQ ID NO: 722 - protein, 10 aa, synthetic construct
  REGION 1..10: note = Protease cleavage site
AFPLEFKREL

SEQ ID NO: 723 - protein, 10 aa, synthetic construct
  REGION 1..10: note = Protease cleavage site
AFPLEFEREL

SEQ ID NO: 724 - protein, 10 aa, synthetic construct
  REGION 1..10: note = Protease cleavage site
AFPLEFEREL

SEQ ID NO: 725 - protein, 10 aa, synthetic construct
  REGION 1..10: note = Protease cleavage site
AFPLEFIREL

SEQ ID NO: 726 - protein, 10 aa, synthetic construct
  REGION 1..10: note = Protease cleavage site
AFPLEFFREL

SEQ ID NO: 727 - protein, 10 aa, synthetic construct
  REGION 1..10: note = Protease cleavage site
KIPYILKRQL

SEQ ID NO: 728 - protein, 10 aa, synthetic construct
  REGION 1..10: note = Protease cleavage site
KIPYILRRQL

SEQ ID NO: 729 - protein, 10 aa, synthetic construct
  REGION 1..10: note = Protease cleavage site
KIPYILERQL

SEQ ID NO: 730 - protein, 10 aa, synthetic construct
  REGION 1..10: note = Protease cleavage site
KIPYILSRQL

SEQ ID NO: 731 - protein, 10 aa, synthetic construct
  REGION 1..10: note = Protease cleavage site
KIPYILARQL

SEQ ID NO: 732 - protein, 10 aa, synthetic construct
  REGION 1..10: note = Protease cleavage site
KIPYILIRQL

SEQ ID NO: 733 - protein, 10 aa, synthetic construct
  REGION 1..10: note = Protease cleavage site
KIPYILFRQL

SEQ ID NO: 734 - protein, 10 aa, synthetic construct
  REGION 1..10: note = Protease cleavage site
KIPYILFRQL

SEQ ID NO: 735 - protein, 10 aa, synthetic construct
  REGION 1..10: note = Protease cleavage site
KIPYILWRQL

SEQ ID NO: 736 - protein, 19 aa, synthetic construct
  REGION 1..19: note = Protease cleavage site
EDFLQKQQYGISSKYSGFG

SEQ ID NO: 737 - protein, 16 aa, synthetic construct
  REGION 1..16: note = Protease cleavage site
EDFLQKQQYGISSKFM

SEQ ID NO: 738 - protein, 16 aa, synthetic construct
  REGION 1..16: note = Protease cleavage site
EDFLQKQQYGISSKFA

SEQ ID NO: 739 - protein, 16 aa, synthetic construct
  REGION 1..16: note = Protease cleavage site
EDFLQKQQYGISSKFC

SEQ ID NO: 740 - protein, 16 aa, synthetic construct
  REGION 1..16: note = Protease cleavage site
EDFLQKQQYGISSKFF

SEQ ID NO: 741 - protein, 16 aa, synthetic construct
  REGION 1..16: note = Protease cleavage site
EDFLQKQQYGISSKFH

SEQ ID NO: 742 - protein, 16 aa, synthetic construct
  REGION 1..16: note = Protease cleavage site
EDFLQKQQYGISSKFI

SEQ ID NO: 743 - protein, 16 aa, synthetic construct
  REGION 1..16: note = Protease cleavage site
EDFLQKQQYGISSKFK

SEQ ID NO: 744 - protein, 16 aa, synthetic construct
  REGION 1..16: note = Protease cleavage site
EDFLQKQQYGISSKFL

SEQ ID NO: 745 - protein, 16 aa, synthetic construct
  REGION 1..16: note = Protease cleavage site
EDFLQKQQYGISSKFN

SEQ ID NO: 746 - protein, 16 aa, synthetic construct
  REGION 1..16: note = Protease cleavage site
EDFLQKQQYGISSKFR

SEQ ID NO: 747 - protein, 16 aa, synthetic construct
  REGION 1..16: note = Protease cleavage site
EDFLQKQQYGISSKFT

SEQ ID NO: 748 - protein, 16 aa, synthetic construct
  REGION 1..16: note = Protease cleavage site
EDFLQKQQYGISSKFV

SEQ ID NO: 749 - protein, 16 aa, synthetic construct
  REGION 1..16: note = Protease cleavage site
EDFLQKQQYGISSKFW

SEQ ID NO: 750 - protein, 19 aa, synthetic construct
  REGION 1..19: note = Protease cleavage site
EDFLQKQQYGISSKYSGFV

SEQ ID NO: 751 - protein, 19 aa, synthetic construct
  REGION 1..19: note = Protease cleavage site
EDFLQKQQYGISSKYSGFV

SEQ ID NO: 752 - protein, 19 aa, synthetic construct
  REGION 1..19: note = Protease cleavage site
EDFLQKQQYGISSKYSGFM

SEQ ID NO: 753 - protein, 19 aa, synthetic construct
  REGION 1..19: note = Protease cleavage site
EDFLQKQQYGISSKYSGFM

SEQ ID NO: 754 - protein, 19 aa, synthetic construct
  REGION 1..19: note = Protease cleavage site
EDFLQKQQYGISSKYSGFS

SEQ ID NO: 755 - protein, 19 aa, synthetic construct
  REGION 1..19: note = Protease cleavage site
EDFLQKQQYGISSKSSGFV

SEQ ID NO: 756 - protein, 19 aa, synthetic construct
  REGION 1..19: note = Protease cleavage site
EDFLQKQQYGISSKSSGFV

SEQ ID NO: 757 - protein, 19 aa, synthetic construct
  REGION 1..19: note = Protease cleavage site
EDFLQKQQYGISSKSSGFV

SEQ ID NO: 758 - protein, 16 aa, synthetic construct
  REGION 1..16: note = Protease cleavage site
EDFLQKQQYGISSKYV

SEQ ID NO: 759 - protein, 16 aa, synthetic construct
  REGION 1..16: note = Protease cleavage site
EDFLQKQQYGISSKFS

SEQ ID NO: 760 - protein, 5 aa, synthetic construct
  REGION 1..5: note = Protease cleavage site
DDDDK

SEQ ID NO: 761 - protein, 9 aa, synthetic construct
  REGION 1..9: note = Protease cleavage site
HPHLSFMAI

SEQ ID NO: 762 - protein, 9 aa, synthetic construct
  REGION 1..9: note = Protease cleavage site
HPHLSFEAI

SEQ ID NO: 763 - protein, 5 aa, synthetic construct
  REGION 1..5: note = Protease cleavage site
LVPRG

SEQ ID NO: 764 - protein, 11 aa, synthetic construct
  REGION 1..11: note = Protease cleavage site
ELSLSRLRDSA

SEQ ID NO: 765 - protein, 8 aa, synthetic construct
  REGION 1..8: note = Protease cleavage site
ELSLSRLR

SEQ ID NO: 766 - protein, 8 aa, synthetic construct
  REGION 1..8: note = Protease cleavage site
DNYTRLRK

SEQ ID NO: 767 - protein, 8 aa, synthetic construct
  REGION 1..8: note = Protease cleavage site
YTRLRKQM

SEQ ID NO: 768 - protein, 8 aa, synthetic construct
  REGION 1..8: note = Protease cleavage site
APSGRVSM

SEQ ID NO: 769 - protein, 8 aa, synthetic construct
  REGION 1..8: note = Protease cleavage site
VSMIKNLQ

SEQ ID NO: 770 - protein, 8 aa, synthetic construct
  REGION 1..8: note = Protease cleavage site
RIRPKLKW

SEQ ID NO: 771 - protein, 8 aa, synthetic construct
  REGION 1..8: note = Protease cleavage site
AMAPRERK

SEQ ID NO: 772 - protein, 8 aa, synthetic construct
  REGION 1..8: note = Protease cleavage site
NFFWKTFT

SEQ ID NO: 773 - protein, 8 aa, synthetic construct
  REGION 1..8: note = Protease cleavage site
KMYPRGNH

SEQ ID NO: 774 - protein, 8 aa, synthetic construct
  REGION 1..8: note = Protease cleavage site
QTYPRTNT

SEQ ID NO: 775 - protein, 4 aa, synthetic construct
  REGION 1..4: note = Protease cleavage site
IQGR

SEQ ID NO: 776 - protein, 4 aa, synthetic construct
  REGION 1..4: note = Protease cleavage site
IEGR

SEQ ID NO: 777 - protein, 7 aa, synthetic construct
  REGION 1..7: note = Protease cleavage site
  VARIANT 7: note = X can be G or S
ENLYFQX

SEQ ID NO: 778 - skipped

SEQ ID NO: 779 - protein, 6 aa, synthetic construct
  REGION 1..6: note = Protease cleavage site
  VARIANT 6: note = X can be any amino acid
VDVADX

SEQ ID NO: 780-781 - skipped (2 entries)

SEQ ID NO: 782 - protein, 170 aa, synthetic construct
  REGION 1..170: note = Modified kappa-casein (OKC1-T with extra M)
MQEQNQEQPIRCEKDERFFSDKIAKYIPIQYVLSRYPSYGLNYYQQKPVALINNQFLPYPYYAKPAAVRSPAQILQWQVLSNTVPAKSCQAQPTTMARHPHPHLSFMAIPPKKNQDKTEIPTINTIASGEPTSTPTTEAVESTVATLEDSPEVIESPPEINTVQVTSTAV

SEQ ID NO: 783 - protein, 170 aa, synthetic construct
  REGION 1..170: note = Modified kappa-casein (OKC1-T with extra F)
QEQNQEQPIRCEKDERFFSDKIAKYIPIQYVLSRYPSYGLNYYQQKPVALINNQFLPYPYYAKPAAVRSPAQILQWQVLSNTVPAKSCQAQPTTMARHPHPHLSFMAIPPKKNQDKTEIPTINTIASGEPTSTPTTEAVESTVATLEDSPEVIESPPEINTVQVTSTAVF

SEQ ID NO: 784 - protein, 210 aa, synthetic construct
  REGION 1..210: note = Modified beta-casein (OBC-T2 with extra M)
MRELEELNVPGEIVESLSSSEESITRINKKIEKFQSEEQQQTEDELQDKIHPFAQTQSLVYPFPGPIPNSLPQNIPPLTQTPVVVPPFLQPEVMGVSKVKEAMAPKHKEMPFPKYPVEPFTESQSLTLTDVENLHLPLPLLQSWMHQPHQPLPPTVMFPPQSVLSLSQSKVLPVPQKAVPYPQRDMPIQAFLLYQEPVLGPVRGPFPIIV

SEQ ID NO: 785 - protein, 210 aa, synthetic construct
  REGION 1..210: note = Modified beta-casein (OBC-T2 with extra F)
RELEELNVPGEIVESLSSSEESITRINKKIEKFQSEEQQQTEDELQDKIHPFAQTQSLVYPFPGPIPNSLPQNIPPLTQTPVVVPPFLQPEVMGVSKVKEAMAPKHKEMPFPKYPVEPFTESQSLTLTDVENLHLPLPLLQSWMHQPHQPLPPTVMFPPQSVLSLSQSKVLPVPQKAVPYPQRDMPIQAFLLYQEPVLGPVRGPFPIIVF

SEQ ID NO: 786 - protein, 200 aa, synthetic construct
  REGION 1..200: note = Modified alpha S1-casein (OAS1-T with extra M)
MRPKHPIKHQGLPQEVLNENLLRFFVAPFPEVFGKEKVNELSKDIGSESTEDQAMEDIKQMEAESISSSEEIVPNSVEQKHIQKEDVPSERYLGYLEQLLRLKKYKVPQLEIVPNSAEERLHSMKEGIHAQQKEPMIGVNQELAYFYPELFRQFYQLDAYPSGAWYYVPLGTQYTDAPSFSDIPNPIGSENSEKTTMPLW

SEQ ID NO: 787 - protein, 200 aa, synthetic construct
  REGION 1..200: note = Modified alpha S1-casein (OAS1-T with extra F)
RPKHPIKHQGLPQEVLNENLLRFFVAPFPEVFGKEKVNELSKDIGSESTEDQAMEDIKQMEAESISSSEEIVPNSVEQKHIQKEDVPSERYLGYLEQLLRLKKYKVPQLEIVPNSAEERLHSMKEGIHAQQKEPMIGVNQELAYFYPELFRQFYQLDAYPSGAWYYVPLGTQYTDAPSFSDIPNPIGSENSEKTTMPLWF

SEQ ID NO: 788 - protein, 163 aa, synthetic construct; identical to SEQ ID NO: 564
  REGION 1..163: note = modified beta-lactogloublin (OLG1 with extra M)

SEQ ID NO: 789 - protein, 163 aa, synthetic construct
  REGION 1..163: note = modified beta-lactogloublin (OLG1 with extra F)
LIVTQTMKGLDIQKVAGTWYSLAMAASDISLLDAQSAPLRVYVEELKPTPEGDLEILLQKWENGECAQKKIIAEKTKIPAVFKIDALNENKVLVLDTDYKKYLLFCMENSAEPEQSLACQCLVRTPEVDDEALEKFDKALKALPMHIRLSFNPTQLEEQCHIF

SEQ ID NO: 790 - protein, 208 aa, synthetic construct
  REGION 1..208: note = Modified alpha S1-casein (OAS2-T with extra M)
MKNTMEHVSSSEESIISQETYKQEKNMAINPSKENLCSTFCKEVVRNANEEEYSIGSSSEESAEVATEEVKITVDDKHYQKALNEINQFYQKFPQYLQYLYQGPIVLNPWDQVKRNAVPITPTLNREQLSTSEENSKKTVDMESTEVFTKKTKLTEEEKNRLNFLKKISQRYQKFALPQYLKTVYQHQKAMKPWIQPKTKVIPYVRYL

SEQ ID NO: 791 - protein, 208 aa, synthetic construct
  REGION 1..208: note = Modified alpha S1-casein (OAS2-T with extra F)
KNTMEHVSSSEESIISQETYKQEKNMAINPSKENLCSTFCKEVVRNANEEEYSIGSSSEESAEVATEEVKITVDDKHYQKALNEINQFYQKFPQYLQYLYQGPIVLNPWDQVKRNAVPITPTLNREQLSTSEENSKKTVDMESTEVFTKKTKLTEEEKNRLNFLKKISQRYQKFALPQYLKTVYQHQKAMKPWIQPKTKVIPYVRYLF

SEQ ID NO: 792 - DNA, 1896 bp, synthetic construct
  misc_feature 1..1896: note = fusion protein (OBC-T4:FM:OBC-T3:FM:OBC-T2)
  source 1..1896: mol_type = other DNA
agggagctcgaggagttgaacgtgcctggcgagattgtagagtcattgagctctagtgaggagagtataacaaggatcaataaaaagattgaaaaatttcaaagcgaagagcagcaacaaacagaagatgaactgcaagacaaaattcatccttttgctcagacacagagcttggtgtatcccttcccagggccaattcccaatagtctgccccaaaacatccctcccttgacccaaacccccgtagtagtacctccattcttgcagcctgaagtgatgggggtgagtaaagtgaaggaggcaatggcccctaagcataaagagatgccattccctaaatatcccgttgagccattcaccgaatcacaatccttgacacttactgatgtcgagaatttgcacttgccactgcccttgctccaaagctggatgcaccaaccacaccaacctctgcctcccacagtgatgttcccaccccaatccgtcttgtctctgtcccagtcaaaggtgttgcctgttcctcagaaagcagttccctatccccaacgcgatatgcccatccaggcttttctcttgtatcaagaaccagtgctcggtcctgtcagaggccccttccccattatcgtgttcatgagggaactcgaggaacttaacgttccaggtgagatcgtcgagtccctctcatcttccgaagagtccattaccaggatcaacaagaagatcgagaagttccagtccgaggaacaacagcaaaccgaggatgagcttcaggacaagattcacccattcgctcagacccagtctctcgtgtatccatttccagggccaattccaaacagcctgccacagaacattccaccacttactcagaccccagttgtggtgccaccattccttcaaccagaggttatgggagtgtccaaggtgaaagaagccatggcaccaaagcacaaagagatgccctttccaaagtaccccgttgagccattcactgagtctcagtctcttaccctcaccgacgttgagaaccttcaccttccacttccattgctccagtcttggatgcatcaaccacatcagccacttccaccaaccgttatgttcccacctcagtccgtgcttagcctctctcagtctaaggttttgccagtgcctcagaaggccgttccatatccacaaagggatatgccaatccaggccttcttgctctaccaagagccagttcttggaccagtgagaggcccatttccaatcattgtgttcatgcgcgaactggaagagttgaacgtaccaggagagattgtagaatcactgagctcctcagaggagtctattactcgtatcaacaagaagatagagaagttccaatccgaggagcaacaacaaacagaggacgaattgcaggacaagatacatcctttcgcacagacccagagcctcgtctatccctttccaggtccaatccctaactctctcccccagaatatcccacccttgactcagactcccgtggtcgtaccccctttcttgcaacccgaggtgatgggggtttctaaagtcaaagaggctatggctcctaaacataaggaaatgccttttcccaaatatccagtggagccattcactgagagccagtctctgacacttacagatgtggaaaacttgcacctgcccttgccacttttgcagtcctggatgcaccaaccacatcaacccttgccccccacagtgatgtttcctccacaatcagttcttagtctctcccaaagcaaagtccttccagtgcctcagaaggccgtcccatacccccagagagatatgccaatacaggcattcttgctttaccaggaaccagtgctcggtcctgtacgtggcccattccctatcatagtgtaa

SEQ ID NO: 793 - protein, 631 aa, synthetic construct
  REGION 1..631: note = fusion protein (OBC-T4:FM:OBC-T3:FM:OBC-T2)
RELEELNVPGEIVESLSSSEESITRINKKIEKFQSEEQQQTEDELQDKIHPFAQTQSLVYPFPGPIPNSLPQNIPPLTQTPVVVPPFLQPEVMGVSKVKEAMAPKHKEMPFPKYPVEPFTESQSLTLTDVENLHLPLPLLQSWMHQPHQPLPPTVMFPPQSVLSLSQSKVLPVPQKAVPYPQRDMPIQAFLLYQEPVLGPVRGPFPIIVFMRELEELNVPGEIVESLSSSEESITRINKKIEKFQSEEQQQTEDELQDKIHPFAQTQSLVYPFPGPIPNSLPQNIPPLTQTPVVVPPFLQPEVMGVSKVKEAMAPKHKEMPFPKYPVEPFTESQSLTLTDVENLHLPLPLLQSWMHQPHQPLPPTVMFPPQSVLSLSQSKVLPVPQKAVPYPQRDMPIQAFLLYQEPVLGPVRGPFPIIVFMRELEELNVPGEIVESLSSSEESITRINKKIEKFQSEEQQQTEDELQDKIHPFAQTQSLVYPFPGPIPNSLPQNIPPLTQTPVVVPPFLQPEVMGVSKVKEAMAPKHKEMPFPKYPVEPFTESQSLTLTDVENLHLPLPLLQSWMHQPHQPLPPTVMFPPQSVLSLSQSKVLPVPQKAVPYPQRDMPIQAFLLYQEPVLGPVRGPFPIIV

SEQ ID NO: 794 - DNA, 2388 bp, synthetic construct
  misc_feature 1..2388: note = fusion protein (OBC-T4:FM:OBC-T3:FM:OBC-T2:FM:OLG1)
  source 1..2388: mol_type = other DNA
agggagctcgaggagttgaacgtgcctggcgagattgtagagtcattgagctctagtgaggagagtataacaaggatcaataaaaagattgaaaaatttcaaagcgaagagcagcaacaaacagaagatgaactgcaagacaaaattcatccttttgctcagacacagagcttggtgtatcccttcccagggccaattcccaatagtctgccccaaaacatccctcccttgacccaaacccccgtagtagtacctccattcttgcagcctgaagtgatgggggtgagtaaagtgaaggaggcaatggcccctaagcataaagagatgccattccctaaatatcccgttgagccattcaccgaatcacaatccttgacacttactgatgtcgagaatttgcacttgccactgcccttgctccaaagctggatgcaccaaccacaccaacctctgcctcccacagtgatgttcccaccccaatccgtcttgtctctgtcccagtcaaaggtgttgcctgttcctcagaaagcagttccctatccccaacgcgatatgcccatccaggcttttctcttgtatcaagaaccagtgctcggtcctgtcagaggccccttccccattatcgtgttcatgagggaactcgaggaacttaacgttccaggtgagatcgtcgagtccctctcatcttccgaagagtccattaccaggatcaacaagaagatcgagaagttccagtccgaggaacaacagcaaaccgaggatgagcttcaggacaagattcacccattcgctcagacccagtctctcgtgtatccatttccagggccaattccaaacagcctgccacagaacattccaccacttactcagaccccagttgtggtgccaccattccttcaaccagaggttatgggagtgtccaaggtgaaagaagccatggcaccaaagcacaaagagatgccctttccaaagtaccccgttgagccattcactgagtctcagtctcttaccctcaccgacgttgagaaccttcaccttccacttccattgctccagtcttggatgcatcaaccacatcagccacttccaccaaccgttatgttcccacctcagtccgtgcttagcctctctcagtctaaggttttgccagtgcctcagaaggccgttccatatccacaaagggatatgccaatccaggccttcttgctctaccaagagccagttcttggaccagtgagaggcccatttccaatcattgtgttcatgcgcgaactggaagagttgaacgtaccaggagagattgtagaatcactgagctcctcagaggagtctattactcgtatcaacaagaagatagagaagttccaatccgaggagcaacaacaaacagaggacgaattgcaggacaagatacatcctttcgcacagacccagagcctcgtctatccctttccaggtccaatccctaactctctcccccagaatatcccacccttgactcagactcccgtggtcgtaccccctttcttgcaacccgaggtgatgggggtttctaaagtcaaagaggctatggctcctaaacataaggaaatgccttttcccaaatatccagtggagccattcactgagagccagtctctgacacttacagatgtggaaaacttgcacctgcccttgccacttttgcagtcctggatgcaccaaccacatcaacccttgccccccacagtgatgtttcctccacaatcagttcttagtctctcccaaagcaaagtccttccagtgcctcagaaggccgtcccatacccccagagagatatgccaatacaggcattcttgctttaccaggaaccagtgctcggtcctgtacgtggcccattccctatcatagtgttcatgttgatcgtaacacagactatgaagggtcttgatatacagaaggtggccgggacttggtacagtttggcaatggccgcatccgacatctccttgttggacgcacaatcagccccattgcgtgtgtacgtagaagagcttaaaccaactcccgagggggatctggaaattctgctccagaaatgggagaacggtgagtgcgcccagaagaagatcatcgcagagaagaccaaaattccagcagtattcaaaatcgacgcattgaacgaaaataaggtgctcgtactggacactgattataagaagtatctccttttctgtatggagaactcagcagagcctgaacagagtcttgcctgccaatgccttgttcgtaccccagaggtagatgatgaagctctggaaaagttcgataaggcccttaaggctctgcctatgcacattaggctttctttcaatccaactcaacttgaggaacaatgtcacatttaa

SEQ ID NO: 795 - protein, 795 aa, synthetic construct
  REGION 1..795: note = fusion protein (OBC-T4:FM:OBC-T3:FM:OBC-T2:FM:OLG1)
RELEELNVPGEIVESLSSSEESITRINKKIEKFQSEEQQQTEDELQDKIHPFAQTQSLVYPFPGPIPNSLPQNIPPLTQTPVVVPPFLQPEVMGVSKVKEAMAPKHKEMPFPKYPVEPFTESQSLTLTDVENLHLPLPLLQSWMHQPHQPLPPTVMFPPQSVLSLSQSKVLPVPQKAVPYPQRDMPIQAFLLYQEPVLGPVRGPFPIIVFMRELEELNVPGEIVESLSSSEESITRINKKIEKFQSEEQQQTEDELQDKIHPFAQTQSLVYPFPGPIPNSLPQNIPPLTQTPVVVPPFLQPEVMGVSKVKEAMAPKHKEMPFPKYPVEPFTESQSLTLTDVENLHLPLPLLQSWMHQPHQPLPPTVMFPPQSVLSLSQSKVLPVPQKAVPYPQRDMPIQAFLLYQEPVLGPVRGPFPIIVFMRELEELNVPGEIVESLSSSEESITRINKKIEKFQSEEQQQTEDELQDKIHPFAQTQSLVYPFPGPIPNSLPQNIPPLTQTPVVVPPFLQPEVMGVSKVKEAMAPKHKEMPFPKYPVEPFTESQSLTLTDVENLHLPLPLLQSWMHQPHQPLPPTVMFPPQSVLSLSQSKVLPVPQKAVPYPQRDMPIQAFLLYQEPVLGPVRGPFPIIVFMLIVTQTMKGLDIQKVAGTWYSLAMAASDISLLDAQSAPLRVYVEELKPTPEGDLEILLQKWENGECAQKKIIAEKTKIPAVFKIDALNENKVLVLDTDYKKYLLFCMENSAEPEQSLACQCLVRTPEVDDEALEKFDKALKALPMHIRLSFNPTQLEEQCHI

SEQ ID NO: 796 - DNA, 1884 bp, synthetic construct
  misc_feature 1..1884: note = fusion protein (OBC-T4:OBC-T3:OBC-T2)
  source 1..1884: mol_type = other DNA
agggagctcgaggagttgaacgtgcctggcgagattgtagagtcattgagctctagtgaggagagtataacaaggatcaataaaaagattgaaaaatttcaaagcgaagagcagcaacaaacagaagatgaactgcaagacaaaattcatccttttgctcagacacagagcttggtgtatcccttcccagggccaattcccaatagtctgccccaaaacatccctcccttgacccaaacccccgtagtagtacctccattcttgcagcctgaagtgatgggggtgagtaaagtgaaggaggcaatggcccctaagcataaagagatgccattccctaaatatcccgttgagccattcaccgaatcacaatccttgacacttactgatgtcgagaatttgcacttgccactgcccttgctccaaagctggatgcaccaaccacaccaacctctgcctcccacagtgatgttcccaccccaatccgtcttgtctctgtcccagtcaaaggtgttgcctgttcctcagaaagcagttccctatccccaacgcgatatgcccatccaggcttttctcttgtatcaagaaccagtgctcggtcctgtcagaggccccttccccattatcgtgagggaactcgaggaacttaacgttccaggtgagatcgtcgagtccctctcatcttccgaagagtccattaccaggatcaacaagaagatcgagaagttccagtccgaggaacaacagcaaaccgaggatgagcttcaggacaagattcacccattcgctcagacccagtctctcgtgtatccatttccagggccaattccaaacagcctgccacagaacattccaccacttactcagaccccagttgtggtgccaccattccttcaaccagaggttatgggagtgtccaaggtgaaagaagccatggcaccaaagcacaaagagatgccctttccaaagtaccccgttgagccattcactgagtctcagtctcttaccctcaccgacgttgagaaccttcaccttccacttccattgctccagtcttggatgcatcaaccacatcagccacttccaccaaccgttatgttcccacctcagtccgtgcttagcctctctcagtctaaggttttgccagtgcctcagaaggccgttccatatccacaaagggatatgccaatccaggccttcttgctctaccaagagccagttcttggaccagtgagaggcccatttccaatcattgtgcgcgaactggaagagttgaacgtaccaggagagattgtagaatcactgagctcctcagaggagtctattactcgtatcaacaagaagatagagaagttccaatccgaggagcaacaacaaacagaggacgaattgcaggacaagatacatcctttcgcacagacccagagcctcgtctatccctttccaggtccaatccctaactctctcccccagaatatcccacccttgactcagactcccgtggtcgtaccccctttcttgcaacccgaggtgatgggggtttctaaagtcaaagaggctatggctcctaaacataaggaaatgccttttcccaaatatccagtggagccattcactgagagccagtctctgacacttacagatgtggaaaacttgcacctgcccttgccacttttgcagtcctggatgcaccaaccacatcaacccttgccccccacagtgatgtttcctccacaatcagttcttagtctctcccaaagcaaagtccttccagtgcctcagaaggccgtcccatacccccagagagatatgccaatacaggcattcttgctttaccaggaaccagtgctcggtcctgtacgtggcccattccctatcatagtgtaa

SEQ ID NO: 797 - protein, 627 aa, synthetic construct
  REGION 1..627: note = fusion protein (OBC-T4:OBC-T3:OBC-T2)
RELEELNVPGEIVESLSSSEESITRINKKIEKFQSEEQQQTEDELQDKIHPFAQTQSLVYPFPGPIPNSLPQNIPPLTQTPVVVPPFLQPEVMGVSKVKEAMAPKHKEMPFPKYPVEPFTESQSLTLTDVENLHLPLPLLQSWMHQPHQPLPPTVMFPPQSVLSLSQSKVLPVPQKAVPYPQRDMPIQAFLLYQEPVLGPVRGPFPIIVRELEELNVPGEIVESLSSSEESITRINKKIEKFQSEEQQQTEDELQDKIHPFAQTQSLVYPFPGPIPNSLPQNIPPLTQTPVVVPPFLQPEVMGVSKVKEAMAPKHKEMPFPKYPVEPFTESQSLTLTDVENLHLPLPLLQSWMHQPHQPLPPTVMFPPQSVLSLSQSKVLPVPQKAVPYPQRDMPIQAFLLYQEPVLGPVRGPFPIIVRELEELNVPGEIVESLSSSEESITRINKKIEKFQSEEQQQTEDELQDKIHPFAQTQSLVYPFPGPIPNSLPQNIPPLTQTPVVVPPFLQPEVMGVSKVKEAMAPKHKEMPFPKYPVEPFTESQSLTLTDVENLHLPLPLLQSWMHQPHQPLPPTVMFPPQSVLSLSQSKVLPVPQKAVPYPQRDMPIQAFLLYQEPVLGPVRGPFPIIV

SEQ ID NO: 798 - DNA, 2370 bp, synthetic construct
  misc_feature 1..2370: note = fusion protein (OBC-T4:OBC-T3:OBC-T2:OLG1)
  source 1..2370: mol_type = other DNA
agggagctcgaggagttgaacgtgcctggcgagattgtagagtcattgagctctagtgaggagagtataacaaggatcaataaaaagattgaaaaatttcaaagcgaagagcagcaacaaacagaagatgaactgcaagacaaaattcatccttttgctcagacacagagcttggtgtatcccttcccagggccaattcccaatagtctgccccaaaacatccctcccttgacccaaacccccgtagtagtacctccattcttgcagcctgaagtgatgggggtgagtaaagtgaaggaggcaatggcccctaagcataaagagatgccattccctaaatatcccgttgagccattcaccgaatcacaatccttgacacttactgatgtcgagaatttgcacttgccactgcccttgctccaaagctggatgcaccaaccacaccaacctctgcctcccacagtgatgttcccaccccaatccgtcttgtctctgtcccagtcaaaggtgttgcctgttcctcagaaagcagttccctatccccaacgcgatatgcccatccaggcttttctcttgtatcaagaaccagtgctcggtcctgtcagaggccccttccccattatcgtgagggaactcgaggaacttaacgttccaggtgagatcgtcgagtccctctcatcttccgaagagtccattaccaggatcaacaagaagatcgagaagttccagtccgaggaacaacagcaaaccgaggatgagcttcaggacaagattcacccattcgctcagacccagtctctcgtgtatccatttccagggccaattccaaacagcctgccacagaacattccaccacttactcagaccccagttgtggtgccaccattccttcaaccagaggttatgggagtgtccaaggtgaaagaagccatggcaccaaagcacaaagagatgccctttccaaagtaccccgttgagccattcactgagtctcagtctcttaccctcaccgacgttgagaaccttcaccttccacttccattgctccagtcttggatgcatcaaccacatcagccacttccaccaaccgttatgttcccacctcagtccgtgcttagcctctctcagtctaaggttttgccagtgcctcagaaggccgttccatatccacaaagggatatgccaatccaggccttcttgctctaccaagagccagttcttggaccagtgagaggcccatttccaatcattgtgcgcgaactggaagagttgaacgtaccaggagagattgtagaatcactgagctcctcagaggagtctattactcgtatcaacaagaagatagagaagttccaatccgaggagcaacaacaaacagaggacgaattgcaggacaagatacatcctttcgcacagacccagagcctcgtctatccctttccaggtccaatccctaactctctcccccagaatatcccacccttgactcagactcccgtggtcgtaccccctttcttgcaacccgaggtgatgggggtttctaaagtcaaagaggctatggctcctaaacataaggaaatgccttttcccaaatatccagtggagccattcactgagagccagtctctgacacttacagatgtggaaaacttgcacctgcccttgccacttttgcagtcctggatgcaccaaccacatcaacccttgccccccacagtgatgtttcctccacaatcagttcttagtctctcccaaagcaaagtccttccagtgcctcagaaggccgtcccatacccccagagagatatgccaatacaggcattcttgctttaccaggaaccagtgctcggtcctgtacgtggcccattccctatcatagtgttgatcgtaacacagactatgaagggtcttgatatacagaaggtggccgggacttggtacagtttggcaatggccgcatccgacatctccttgttggacgcacaatcagccccattgcgtgtgtacgtagaagagcttaaaccaactcccgagggggatctggaaattctgctccagaaatgggagaacggtgagtgcgcccagaagaagatcatcgcagagaagaccaaaattccagcagtattcaaaatcgacgcattgaacgaaaataaggtgctcgtactggacactgattataagaagtatctccttttctgtatggagaactcagcagagcctgaacagagtcttgcctgccaatgccttgttcgtaccccagaggtagatgatgaagctctggaaaagttcgataaggcccttaaggctctgcctatgcacattaggctttctttcaatccaactcaacttgaggaacaatgtcacatttaa

SEQ ID NO: 799 - protein, 789 aa, synthetic construct
  REGION 1..789: note = fusion protein (OBC-T4:OBC-T3:OBC-T2:OLG1)
RELEELNVPGEIVESLSSSEESITRINKKIEKFQSEEQQQTEDELQDKIHPFAQTQSLVYPFPGPIPNSLPQNIPPLTQTPVVVPPFLQPEVMGVSKVKEAMAPKHKEMPFPKYPVEPFTESQSLTLTDVENLHLPLPLLQSWMHQPHQPLPPTVMFPPQSVLSLSQSKVLPVPQKAVPYPQRDMPIQAFLLYQEPVLGPVRGPFPIIVRELEELNVPGEIVESLSSSEESITRINKKIEKFQSEEQQQTEDELQDKIHPFAQTQSLVYPFPGPIPNSLPQNIPPLTQTPVVVPPFLQPEVMGVSKVKEAMAPKHKEMPFPKYPVEPFTESQSLTLTDVENLHLPLPLLQSWMHQPHQPLPPTVMFPPQSVLSLSQSKVLPVPQKAVPYPQRDMPIQAFLLYQEPVLGPVRGPFPIIVRELEELNVPGEIVESLSSSEESITRINKKIEKFQSEEQQQTEDELQDKIHPFAQTQSLVYPFPGPIPNSLPQNIPPLTQTPVVVPPFLQPEVMGVSKVKEAMAPKHKEMPFPKYPVEPFTESQSLTLTDVENLHLPLPLLQSWMHQPHQPLPPTVMFPPQSVLSLSQSKVLPVPQKAVPYPQRDMPIQAFLLYQEPVLGPVRGPFPIIVLIVTQTMKGLDIQKVAGTWYSLAMAASDISLLDAQSAPLRVYVEELKPTPEGDLEILLQKWENGECAQKKIIAEKTKIPAVFKIDALNENKVLVLDTDYKKYLLFCMENSAEPEQSLACQCLVRTPEVDDEALEKFDKALKALPMHIRLSFNPTQLEEQCHI

SEQ ID NO: 800 - protein, 237 aa, Saccharum officinarum
MPGLPTRSAAYLLAYLLQNREELDTMKVLLVALALLALAASAASTLTSGGCGCQTPHLPPPVHLPPPVDLPPPVHLPPPVHLPPSVHVPPPPPSCHYPTLQPRPQPPHPCPCHPTSPCHPGHLVGSPPILGQCIEFLRHQCSPAATPYCSPQCQALQQQCCQQLRQVEPLHRYQAIFGVVLQFIQQQQPQGQSPLGTLMAAANSAPTDGDVRSATKYKSLPFCSAPAGVSHTEETMS

SEQ ID NO: 801 - protein, 223 aa, Zea mays
MRVLLVALALLALAASATSTHTSGGCGCQPPPPVHLPPPVHLPPPVHLPPPVHLPPPVHLPPPVHLPPPVHVPPPVHLPPPPCHYPTQPPRPQPHPQPHPCPCQQPHPSPCQLQGTCGVGSTPILGQCVEFLRHQCSPTATPYCSPQCQSLRQQCCQQLRQVEPQHRYQAIFGLVLQSILQQQPQSGQVAGLLAAQIAQQLTAMCGLQQPTPCPYAAAGGVPH

SEQ ID NO: 802 - DNA, 1224 bp, synthetic construct
  misc_feature 1..1224: note = fusion protein (gcan27:FM:OBC-T2)
  source 1..1224: mol_type = other DNA
gccgccagcacactcacatccggcggctgcggctgccaaactcctcatctccctccaccagtgcacctgccaccaccagttgatctgcctcctcctgtacacctcccacctcccgtgcatttgcctccaagcgtgcacgtacccccacctccaccttcatgccattatcccactctgcaaccaagaccacaacccccacacccctgcccctgtcaccccacttctccttgtcatcctggccaccttgtcgggagcccccccatccttggtcaatgcattgagttccttaggcatcaatgcagtcctgctgccaccccatattgttcccctcagtgccaggctttgcaacaacagtgttgccagcagttgaggcaagtggagcctcttcatcgctaccaagcaatatttggagtagtattgcagttcatacaacaacagcagccccaaggccagtccccccttggtactctgatggcagcagccaattctgcaccaaccgacggcgatgtaagaagtgctaccaagtacaaatccctgccattttgctcagcaccagcaggagtatctcacacagaagaaactatgtccttcatgcgcgaactggaagagttgaacgtaccaggagagattgtagaatcactgagctcctcagaggagtctattactcgtatcaacaagaagatagagaagttccaatccgaggagcaacaacaaacagaggacgaattgcaggacaagatacatcctttcgcacagacccagagcctcgtctatccctttccaggtccaatccctaactctctcccccagaatatcccacccttgactcagactcccgtggtcgtaccccctttcttgcaacccgaggtgatgggggtttctaaagtcaaagaggctatggctcctaaacataaggaaatgccttttcccaaatatccagtggagccattcactgagagccagtctctgacacttacagatgtggaaaacttgcacctgcccttgccacttttgcagtcctggatgcaccaaccacatcaacccttgccccccacagtgatgtttcctccacaatcagttcttagtctctcccaaagcaaagtccttccagtgcctcagaaggccgtcccatacccccagagagatatgccaatacaggcattcttgctttaccaggaaccagtgctcggtcctgtacgtggcccattccctatcatagtgtaa

SEQ ID NO: 803 - protein, 407 aa, synthetic construct
  REGION 1..407: note = fusion protein (gcan27:FM:OBC-T2)
AASTLTSGGCGCQTPHLPPPVHLPPPVDLPPPVHLPPPVHLPPSVHVPPPPPSCHYPTLQPRPQPPHPCPCHPTSPCHPGHLVGSPPILGQCIEFLRHQCSPAATPYCSPQCQALQQQCCQQLRQVEPLHRYQAIFGVVLQFIQQQQPQGQSPLGTLMAAANSAPTDGDVRSATKYKSLPFCSAPAGVSHTEETMSFMRELEELNVPGEIVESLSSSEESITRINKKIEKFQSEEQQQTEDELQDKIHPFAQTQSLVYPFPGPIPNSLPQNIPPLTQTPVVVPPFLQPEVMGVSKVKEAMAPKHKEMPFPKYPVEPFTESQSLTLTDVENLHLPLPLLQSWMHQPHQPLPPTVMFPPQSVLSLSQSKVLPVPQKAVPYPQRDMPIQAFLLYQEPVLGPVRGPFPIIV

SEQ ID NO: 804 - DNA, 588 bp, synthetic construct
  misc_feature 1..588: note = codon optimized gcan27
  source 1..588: mol_type = other DNA
gccgccagcacactcacatccggcggctgcggctgccaaactcctcatctccctccaccagtgcacctgccaccaccagttgatctgcctcctcctgtacacctcccacctcccgtgcatttgcctccaagcgtgcacgtacccccacctccaccttcatgccattatcccactctgcaaccaagaccacaacccccacacccctgcccctgtcaccccacttctccttgtcatcctggccaccttgtcgggagcccccccatccttggtcaatgcattgagttccttaggcatcaatgcagtcctgctgccaccccatattgttcccctcagtgccaggctttgcaacaacagtgttgccagcagttgaggcaagtggagcctcttcatcgctaccaagcaatatttggagtagtattgcagttcatacaacaacagcagccccaaggccagtccccccttggtactctgatggcagcagccaattctgcaccaaccgacggcgatgtaagaagtgctaccaagtacaaatccctgccattttgctcagcaccagcaggagtatctcacacagaagaaactatgtcc

SEQ ID NO: 805 - protein, 196 aa, synthetic construct
  REGION 1..196: note = gcan27
AASTLTSGGCGCQTPHLPPPVHLPPPVDLPPPVHLPPPVHLPPSVHVPPPPPSCHYPTLQPRPQPPHPCPCHPTSPCHPGHLVGSPPILGQCIEFLRHQCSPAATPYCSPQCQALQQQCCQQLRQVEPLHRYQAIFGVVLQFIQQQQPQGQSPLGTLMAAANSAPTDGDVRSATKYKSLPFCSAPAGVSHTEETMS

SEQ ID NO: 806 - DNA, 918 bp, synthetic construct
  misc_feature 1..918: note = fusion protein (yZein:OBC-T2)
  source 1..918: mol_type = other DNA
gcaacatctacacatacttccggaggatgtggttgtcagcctccacctccagtacatttgcctcccccagttcacctgcccccaccagtccaccttcctccacctgttcatctgccaccacccgtacacttgccacctcctgtccatctcccaccacccgtgcatgtccctcccccagtgcatctgcccccacctccatgtcattatccaacccagccaccccgtcctcaaccccatccacagcctcatccctgtccttgtcagcaacctcacccatcaccatgtcaacgcgaactggaagagttgaacgtaccaggagagattgtagaatcactgagctcctcagaggagtctattactcgtatcaacaagaagatagagaagttccaatccgaggagcaacaacaaacagaggacgaattgcaggacaagatacatcctttcgcacagacccagagcctcgtctatccctttccaggtccaatccctaactctctcccccagaatatcccacccttgactcagactcccgtggtcgtaccccctttcttgcaacccgaggtgatgggggtttctaaagtcaaagaggctatggctcctaaacataaggaaatgccttttcccaaatatccagtggagccattcactgagagccagtctctgacacttacagatgtggaaaacttgcacctgcccttgccacttttgcagtcctggatgcaccaaccacatcaacccttgccccccacagtgatgtttcctccacaatcagttcttagtctctcccaaagcaaagtccttccagtgcctcagaaggccgtcccatacccccagagagatatgccaatacaggcattcttgctttaccaggaaccagtgctcggtcctgtacgtggcccattccctatcatagtgtaa

SEQ ID NO: 807 - protein, 305 aa, synthetic construct
  REGION 1..305: note = fusion protein (yZein:OBC-T2)
ATSTHTSGGCGCQPPPPVHLPPPVHLPPPVHLPPPVHLPPPVHLPPPVHLPPPVHVPPPVHLPPPPCHYPTQPPRPQPHPQPHPCPCQQPHPSPCQRELEELNVPGEIVESLSSSEESITRINKKIEKFQSEEQQQTEDELQDKIHPFAQTQSLVYPFPGPIPNSLPQNIPPLTQTPVVVPPFLQPEVMGVSKVKEAMAPKHKEMPFPKYPVEPFTESQSLTLTDVENLHLPLPLLQSWMHQPHQPLPPTVMFPPQSVLSLSQSKVLPVPQKAVPYPQRDMPIQAFLLYQEPVLGPVRGPFPIIV

SEQ ID NO: 808 - DNA, 288 bp, synthetic construct
  misc_feature 1..288: note = codon optimized zein fragment (yZein 17-112)
  source 1..288: mol_type = other DNA
gcaacatctacacatacttccggaggatgtggttgtcagcctccacctccagtacatttgcctcccccagttcacctgcccccaccagtccaccttcctccacctgttcatctgccaccacccgtacacttgccacctcctgtccatctcccaccacccgtgcatgtccctcccccagtgcatctgcccccacctccatgtcattatccaacccagccaccccgtcctcaaccccatccacagcctcatccctgtccttgtcagcaacctcacccatcaccatgtcaa

SEQ ID NO: 809 - protein, 96 aa, synthetic construct
  REGION 1..96: note = zein fragment protein sequence (yZein 17-112)
ATSTHTSGGCGCQPPPPVHLPPPVHLPPPVHLPPPVHLPPPVHLPPPVHLPPPVHVPPPVHLPPPPCHYPTQPPRPQPHPQPHPCPCQQPHPSPCQ

SEQ ID NO: 810 - DNA, 612 bp, synthetic construct
  misc_feature 1..612: note = codon optimized zein fragment (yZein 20-223)
  source 1..612: mol_type = other DNA
acacatacttccggaggatgtggttgtcagcctccacctccagtacatttgcctcccccagttcacctgcccccaccagtccaccttcctccacctgttcatctgccaccacccgtacacttgccacctcctgtccatctcccaccacccgtgcatgtccctcccccagtgcatctgcccccacctccatgtcattatccaacccagccaccccgtcctcaaccccatccacagcctcatccctgtccttgtcagcaacctcacccatcaccatgtcaacttcaaggaacttgtggggtggggagcacccctattctggggcagtgtgtggagttccttcgtcaccaatgttctcctaccgccacaccttattgctcaccacagtgtcagtcactccgtcagcaatgctgtcaacaacttaggcaggtcgaaccacagcataggtatcaggctattttcggattggtcctccaatctatattgcaacagcaacctcaaagcggacaagtagctgggctgttggctgctcagattgcccaacaactgacagctatgtgcggcttgcagcagcctaccccttgtccttatgctgccgcaggaggggtgcctcat

SEQ ID NO: 811 - protein, 204 aa, synthetic construct
  REGION 1..204: note = zein fragment protein sequence (yZein 20-223)
THTSGGCGCQPPPPVHLPPPVHLPPPVHLPPPVHLPPPVHLPPPVHLPPPVHVPPPVHLPPPPCHYPTQPPRPQPHPQPHPCPCQQPHPSPCQLQGTCGVGSTPILGQCVEFLRHQCSPTATPYCSPQCQSLRQQCCQQLRQVEPQHRYQAIFGLVLQSILQQQPQSGQVAGLLAAQIAQQLTAMCGLQQPTPCPYAAAGGVPH

SEQ ID NO: 812 - protein, 6 aa, synthetic construct
  REGION 1..6: note = Zein peptide repeat sequence
PPPVHL

SEQ ID NO: 813 - DNA, 1384 bp, synthetic construct; identical to SEQ ID NO: 19
  misc_feature 1..1384: note = GmSeed2 promoter
  source 1..1384: mol_type = other DNA

SEQ ID NO: 814 - DNA, 57 bp, synthetic construct; identical to SEQ ID NO: 16
  misc_feature 1..57: note = sig2 signal peptide
  source 1..57: mol_type = other DNA

SEQ ID NO: 815 - DNA, 249 bp, synthetic construct; identical to SEQ ID NO: 142
  misc_feature 1..249: note = AtHSP T terminator
  source 1..249: mol_type = other DNA

SEQ ID NO: 816 - DNA, 376 bp, synthetic construct; identical to SEQ ID NO: 143
  misc_feature 1..376: note = AtUbi10T terminator
  source 1..376: mol_type = other DNA

SEQ ID NO: 817 - DNA, 1543 bp, synthetic construct; identical to SEQ ID NO: 18
  misc_feature 1..1543: note = PvPhas promoter
  source 1..1543: mol_type = other DNA

SEQ ID NO: 818 - DNA, 13 bp, synthetic construct
  misc_feature 1..13: note = arc5UTR 5'utr
  source 1..13: mol_type = other DNA
tgaatgcatgatc

SEQ ID NO: 819 - DNA, 96 bp, synthetic construct; identical to SEQ ID NO: 14
  misc_feature 1..96: note = sig10 signal peptide
  source 1..96: mol_type = other DNA

SEQ ID NO: 820 - DNA, 1479 bp, synthetic construct
  misc_feature 1..1479: note = Fam20C protein coding sequence
  source 1..1479: mol_type = other DNA
gacttttccagtgacccctctagcaatttgacctctcactccttggagaaacttccacccgcagccgaagcagcagaaggagccccacctgggcaagacccaggggtcagacgccctccagatcctgctcatagacctcttccacgcgatcctggaccaagaggtcctgtactgcctcctgggctttcaggggatggctcattgctcacccgtctgttccagcacccactctatcaagtgcctatccctccacttaccgagggcgatgtactctttaacgtaaacagcgacatccgcttcaaccccaaagctgcaactgctgaaaatcccgattggccacacgaaggtcctgaggacgagttcctccctaccggagaagctgccgtggacagttatcctaactggttgaagtttcatattggcatcaataggtatgagctctacagtagacacaaccccgctgtaggtgcacttctgcaagatttggggacccaaaagataacctccgtagccatgaaatccggaggaactcagttgaagctcattatgactttccagaattacgggcaggccttgtttaaacctatgaaacaaacaagagaacaggaaacccctcccgattttttttactttagcgactatgaacgccataacgctgaaatagccgctttccatctcgacagaatcctggacttcaggagggtgcctccagtggccggacgccttgtcaatatgaccaaagagatcagagacgtaacaagagataagaagctgtggcgtaccttcttcatttctcctgcaaataacgtgtgtttctacggggaatgctcttattactgtagcaccgagcacgctctgtgcggaaagcctgaccagatagaaggtagcttggcagctttcttgccagaccttgcccttgctaagcgcaagacctggagaaatccctggaggaggtcttatcacaagagaaaaaaagcagagtgggaggtcgatccagattattgtgaggaggtgaggcagacccctccatacgattcaagtcacaggcttttggacgtgatggacatgactatcttcgattttctcatgggaaacatggatcgccaccattatgagacctttgaaaaattcggaaatgaaaccttcattatacatttggataatggtcgcggtttcgggaagcactctcacgatgagctttctatccttgttcccttgcaacaatgttgtaggattagaaggtccacatacctcagattgcaacttctcgctcaggaggaacaccgtctttctctcttgatggctgaagccctgcgcgcagatcgcgtcgctccagtgttgtttcaaccccacctggaagcactggaccgccgcttgaggatcgttctcagagctgtcggcgattgtgtggagaaagacggtctgcattcagtcgtggaggatgacttgggaccagaacaccgtgctgctgcagggagg

SEQ ID NO: 821 - protein, 493 aa, synthetic construct
  REGION 1..493: note = Fam20C protein coding sequence
DFSSDPSSNLTSHSLEKLPPAAEAAEGAPPGQDPGVRRPPDPAHRPLPRDPGPRGPVLPPGLSGDGSLLTRLFQHPLYQVPIPPLTEGDVLFNVNSDIRFNPKAATAENPDWPHEGPEDEFLPTGEAAVDSYPNWLKFHIGINRYELYSRHNPAVGALLQDLGTQKITSVAMKSGGTQLKLIMTFQNYGQALFKPMKQTREQETPPDFFYFSDYERHNAEIAAFHLDRILDFRRVPPVAGRLVNMTKEIRDVTRDKKLWRTFFISPANNVCFYGECSYYCSTEHALCGKPDQIEGSLAAFLPDLALAKRKTWRNPWRRSYHKRKKAEWEVDPDYCEEVRQTPPYDSSHRLLDVMDMTIFDFLMGNMDRHHYETFEKFGNETFIIHLDNGRGFGKHSHDELSILVPLQQCCRIRRSTYLRLQLLAQEEHRLSLLMAEALRADRVAPVLFQPHLEALDRRLRIVLRAVGDCVEKDGLHSVVEDDLGPEHRAAAGR

SEQ ID NO: 822 - DNA, 1197 bp, synthetic construct; identical to SEQ ID NO: 21
  misc_feature 1..1197: note = 3arc terminator
  source 1..1197: mol_type = other DNA

SEQ ID NO: 823 - DNA, 69 bp, synthetic construct
  misc_feature 1..69: note = pat21ss signal peptide
  source 1..69: mol_type = other DNA
atggcaactactaaatcttttttaattttattttttatgatattagcaactactagttcaacatgtgct

SEQ ID NO: 824 - DNA, 66 bp, synthetic construct
  misc_feature 1..66: note = (SP)11 hydroxyproline-rich glycoprotein tag
  source 1..66: mol_type = other DNA
tcaccatcaccatcaccttcacccagtcctagccctagtcctagcccaagcccatctccctcgcct

SEQ ID NO: 825 - protein, 22 aa, synthetic construct
  REGION 1..22: note = (SP)11 hydroxyproline-rich glycoprotein tag
SPSPSPSPSPSPSPSPSPSPSP

SEQ ID NO: 826 - DNA, 180 bp, synthetic construct
  misc_feature 1..180: note = CD45 protein coding sequence
  source 1..180: mol_type = other DNA
gcaaacataaccgtcgactacctttacaataaagagactaagttgtttactgccaagctcaacgtaaacgagaacgtggagtgcggtaataatacctgcactaataatgaggttcacaatcttacagaatgtaagaatgcctccgtaagcattagccataatagctgcacagctcccgat

SEQ ID NO: 827 - protein, 60 aa, synthetic construct
  REGION 1..60: note = CD45 protein
ANITVDYLYNKETKLFTAKLNVNENVECGNNTCTNNEVHNLTECKNASVSISHNSCTAPD

SEQ ID NO: 828 - protein, 7 aa, synthetic construct
  REGION 1..7: note = repeat sequence
PPPPVHL

SEQ ID NO: 829 - protein, 7 aa, synthetic construct
  REGION 1..7: note = repeat sequence
  VARIANT 6: note = X can be S, Y, Q or F
PPPPVXS

SEQ ID NO: 830 - protein, 4 aa, synthetic construct
  REGION 1..4: note = repeat sequence
PPPV

SEQ ID NO: 831 - protein, 5 aa, synthetic construct
  REGION 1..5: note = repeat sequence
  VARIANT 5: note = X can be S or F
PPVHX

SEQ ID NO: 832 - protein, 6 aa, synthetic construct
  REGION 1..6: note = repeat sequence
PPPVHS

SEQ ID NO: 833 - protein, 6 aa, synthetic construct
  REGION 1..6: note = repeat sequence
  VARIANT 5: note = X can be Y, H or F
PPPVXS

SEQ ID NO: 834 - protein, 6 aa, synthetic construct
  REGION 1..6: note = repeat sequence
  VARIANT 5: note = X can be H or D
PPPVXL

SEQ ID NO: 835 - protein, 6 aa, synthetic construct
  REGION 1..6: note = repeat sequence
PPPVHL

SEQ ID NO: 836 - protein, 8 aa, synthetic construct
  REGION 1..8: note = repeat sequence
PPPPPVYS

SEQ ID NO: 837 - protein, 7 aa, synthetic construct
  REGION 1..7: note = repeat sequence
PPPPVHS

SEQ ID NO: 838 - protein, 6 aa, synthetic construct
  REGION 1..6: note = repeat sequence
PPPVHL

SEQ ID NO: 839 - DNA, 252 bp, Glycine max
  source 1..252: mol_type = other DNA
gcacgcatggaactgagcttcttcaaaagtgatcagtcatcaagttatgatgatgatgagtattcaaaaccatgctgtgatctctgcatgtgcacacgctcaatgcctcctcaatgcagctgtgaagatattaggctgaattcatgccactcagattgtaagagctgtatgtgcacacgctcacagccaggacagtgtcgttgtcttgacaccaacgacttctgctacaaaccttgcaagtccagagatgac

SEQ ID NO: 840 - protein, 84 aa, Glycine max
ARMELSFFKSDQSSSYDDDEYSKPCCDLCMCTRSMPPQCSCEDIRLNSCHSDCKSCMCTRSQPGQCRCLDTNDFCYKPCKSRDD

SEQ ID NO: 841 - DNA, 282 bp, Glycine max
  source 1..282: mol_type = other DNA
gccagcttgaggctgagtgagcttggcctgctcatgaaaagtgatcatcatcaacactcaaatgatgatgactcttcaaaaccatgctgtgatcaatgcgcatgcacaaagtcaaaccctcctcaatgccgctgttcagatatgaggctgaattcgtgccattcagcttgcaaatcttgtatttgcgcattatcgtatcctgcacagtgtttttgtgttgacataacggatttctgctatgaaccttgcaagcccagtgaggatgacaaggaaaactactaa

SEQ ID NO: 842 - protein, 93 aa, Glycine max
ASLRLSELGLLMKSDHHQHSNDDDSSKPCCDQCACTKSNPPQCRCSDMRLNSCHSACKSCICALSYPAQCFCVDITDFCYEPCKPSEDDKENY

SEQ ID NO: 843 - DNA, 537 bp, Glycine max
  source 1..537: mol_type = other DNA
cagttcgtgctcgacactgatgatgatcctcttcaaaacggtggcacatactatatgttgccagttatgagaggaaagggcggtggaatagaagtagattcaactggaaaagaaatatgccctctcactgttgtgcaatcacccaatgagctcgataaggggattggactagtctttacatctccattacatgccctttttatcgccgaaggctatcctttgagcattaagtttggttcatttgcagttataacgctgtgtgccggcatgcctactgagtgggctattgtggagagagagggtctacaagctgttaaacttgctgcacgcgatacagtagatggttggtttaatattgagagagtttcccgtgaatacaatgactataagcttgtgttctgtccacagcaagctgaagataacaaatgcgaggatattgggattcagatcgacgatgatggaatcaggcgtttagtgctgtctaagaacaaaccattagtggttcagtttcagaaatttagatcatcaactgcatga

SEQ ID NO: 844 - protein, 178 aa, Glycine max
QFVLDTDDDPLQNGGTYYMLPVMRGKGGGIEVDSTGKEICPLTVVQSPNELDKGIGLVFTSPLHALFIAEGYPLSIKFGSFAVITLCAGMPTEWAIVEREGLQAVKLAARDTVDGWFNIERVSREYNDYKLVFCPQQAEDNKCEDIGIQIDDDGIRRLVLSKNKPLVVQFQKFRSSTA

SEQ ID NO: 845 - DNA, 540 bp, Glycine max
  source 1..540: mol_type = other DNA
cagttcgtgctcgacactgatgatgatcctcttcaaaacggtggcacatactatatgttgccagttatgagaggaaagagcggtggaatagaaggaaattcaactggaaaagaaatatgccctctcactgttgtgcaatcacccaataagcacaataaggggattggactagtctttaaatctccattacatgccctttttatcgccgaacggtatcctttgagcattaagtttgattcatttgcagttataccgctgtgtggcgtcatgcctactaagtgggctattgtggagagagagggtctacaagctgttacacttgctgcacgcgatacagtagatggttggtttaatattgagagagtttcccgtgaatacaatgactactataagcttgtgttctgtccacaggaagctgaagataacaaatgcgaggatattgggattcagatcgacaatgatggaatcaggcgtttagtgctgtctaagaacaaaccattagtggttgagtttcagaaatttagatcatcaactgcatga

SEQ ID NO: 846 - protein, 179 aa, Glycine max
QFVLDTDDDPLQNGGTYYMLPVMRGKSGGIEGNSTGKEICPLTVVQSPNKHNKGIGLVFKSPLHALFIAERYPLSIKFDSFAVIPLCGVMPTKWAIVEREGLQAVTLAARDTVDGWFNIERVSREYNDYYKLVFCPQEAEDNKCEDIGIQIDNDGIRRLVLSKNKPLVVEFQKFRSSTA

SEQ ID NO: 847 - DNA, 576 bp, Glycine max
  source 1..576: mol_type = other DNA
gatttcgtgctcgataatgaaggtaaccctcttgaaaatggtggcacatattatatcttgtcagacataacagcatttggtggaataagagcagccccaacgggaaatgaaagatgccctctcactgtggtgcaatctcgcaatgagctcgacaaagggattggaacaatcatctcgtccccatatcgaatccgttttatcgccgaaggccatcctttgagccttaagttcgattcatttgcagttataatgctgtgtgttggaattcctaccgagtggtctgttgtggaggatctaccagaaggacctgctgttaaaattggtgagaacaaagatgcaatggatggttggtttagacttgagagagtttctgatgatgaattcaataactataagcttgtgttctgtccacagcaagctgaggatgacaaatgtggggatattgggattagtattgatcatgatgatggaaccaggcgtttggtggtgtctaagaacaaaccgttagtggttcagtttcaaaaacttgataaagaatcactggccaagaaaaatcatggcctttctcgcagtgag

SEQ ID NO: 848 - protein, 192 aa, Glycine max
DFVLDNEGNPLENGGTYYILSDITAFGGIRAAPTGNERCPLTVVQSRNELDKGIGTIISSPYRIRFIAEGHPLSLKFDSFAVIMLCVGIPTEWSVVEDLPEGPAVKIGENKDAMDGWFRLERVSDDEFNNYKLVFCPQQAEDDKCGDIGISIDHDDGTRRLVVSKNKPLVVQFQKLDKESLAKKNHGLSRSE

SEQ ID NO: 849 - DNA, 468 bp, Glycine max
  source 1..468: mol_type = other DNA
gctcatcttgaatacgttgagaacctcaatgtaaaggaacaactcgtagcaggaaccctctattacataaccttggtggcaactgacgctggcaaaaagaaaatctatgaaaccaaaatttgggttaaagagtgggaagacttcaagaaagtggtagaatttaagttggtcggtgacgatagtccaaatccaggcggaattaccaacgtcccattcccaaaccttcctcagttcaaggacctcgcacgctttgccgtacaggactataataagaaggaaaatgctcaccttgaatttgttgagaaccttaatgttaaagaacaagtagttgcaggcataatctactatatcaccttggtcgcaacagacgcaggtaagaagaagatttatgagacaaaaatccttgtaaaaggttgggaaaacttcaaagaagtccaggagttcaaattggtgggagacgcaacaaaa

SEQ ID NO: 850 - protein, 156 aa, Glycine max
AHLEYVENLNVKEQLVAGTLYYITLVATDAGKKKIYETKIWVKEWEDFKKVVEFKLVGDDSPNPGGITNVPFPNLPQFKDLARFAVQDYNKKENAHLEFVENLNVKEQVVAGIIYYITLVATDAGKKKIYETKILVKGWENFKEVQEFKLVGDATK

SEQ ID NO: 851 - DNA, 1323 bp, Glycine max
  source 1..1323: mol_type = other DNA
atggaggctaagttggccaccaccataatacttattttctccgtaatttggcttatgagggtgaatggcatagacccttgtgcctctcaagcggataattccgacctgaacgtgattcccatctacagcaaatgctcaccgttcaaaccaccaaagtcagactcatcgtgggacaacagaattataaacatggcctcaaaagacccactccgattcaaatacttgtccaccttagtgggccaaaagaccgtgtccacggccccaatcgcttcgggccagaccttcaacatcggcaactacgtcgtcagggtcaaattgggaacccctggtcaacttttgttcatggtcctcgacaccagcaccgacgaggccttcgttccatgctcgggctgcacgggctgctccgacaccactttctcgcccaaagcctccaccagctatggcccattggactgctctgttccccagtgcggtcaggtccgcgggctttcgtgccccgccacaggtaccggcgcgtgctccttcaaccaatcctacgcgggctcatctttctccgccaccctagtccaagactcgttaagattagccactgatgttatccccaactactccttcggctgcgtcaacgccatcaccggcgcctctgtcccggcccaagggcttttgggcctgggccgtggcccgctgtccttgctctcccaatccgggtcaaattactcgggcatcttctcttactgtctccccagcttcaagtcctactacttctctgggtcgctcaagctcgggcccgtgggccagcccaagagcattcgcaccaccccgcttcttcgcagccctcaccgtccttctctttactacgtgaacttcaccggaatcagcgtgggacgtgtcctggtaccctttcccagcgagtatcttgggtttaacccgaatacaggatccggaaccataattgattcgggcacggttataacccggttcgtggagcccgtttacaacgcggtgagggaggagttcaggaagcaggtgggaggcactacattcacgagcattggagccttcgatacgtgttttgtgaaaacctacgaaactctggcgccgccaattacgctgcacttcgaggggttggacctgaaactgccgttggaaaacagcttgatccacagcagcgcgggttcgctggcgtgtcttgcaatggcggcggcacccgacaatgtgaactcggtgttgaacgtcatcgccaactttcagcaacagaaccttaggattttgtttgataccgtcaataataaggttggcatagcccgtgaggtttgtaactag

SEQ ID NO: 852 - protein, 440 aa, Glycine max
MEAKLATTIILIFSVIWLMRVNGIDPCASQADNSDLNVIPIYSKCSPFKPPKSDSSWDNRIINMASKDPLRFKYLSTLVGQKTVSTAPIASGQTFNIGNYVVRVKLGTPGQLLFMVLDTSTDEAFVPCSGCTGCSDTTFSPKASTSYGPLDCSVPQCGQVRGLSCPATGTGACSFNQSYAGSSFSATLVQDSLRLATDVIPNYSFGCVNAITGASVPAQGLLGLGRGPLSLLSQSGSNYSGIFSYCLPSFKSYYFSGSLKLGPVGQPKSIRTTPLLRSPHRPSLYYVNFTGISVGRVLVPFPSEYLGFNPNTGSGTIIDSGTVITRFVEPVYNAVREEFRKQVGGTTFTSIGAFDTCFVKTYETLAPPITLHFEGLDLKLPLENSLIHSSAGSLACLAMAAAPDNVNSVLNVIANFQQQNLRILFDTVNNKVGIAREVCN

SEQ ID NO: 853 - DNA, 1143 bp, Glycine max
  source 1..1143: mol_type = other DNA
atggaggcaaagcgaggccatgccctcatgtgcttggcacgtgtttcactcttcctctgcgctctaaccctatccgctgctcacggaagcaccacggttcaagacatcgcgagaaagttgaaactcggggacaacgagcttctgcgcacggagaagaagttcaaggttttcatggagaattacgggaggagctactccacagaggaggagtatttgcgccgtttggggattttcgcccagaacatggtcagagcggcggagcatcaggcgctggaccccaccgccgtccacggcgtcacgcagttctccgatctcaccgaggacgagtttgagaagctctacactggcgtcaatggcggcttcccgtcatcgaataatgccgccggcggtattgcgccgccgttggaggtggacgggctgccggagaattttgattggagagagaaaggagctgtcaccgaagttaagttacagggtagatgtggatcatgctgggctttcagcaccacaggatctatagaaggagccaattttcttgccaccggaaagctcgtcagtcttagtgaacaacagctccttgactgtgacaacaagtgtgacataacagaaaagacttcatgtgacaatgggtgtaatggaggtcttatgacaaatgcctacaattatttgctcgagtctggtgggttggaggaggagtcttcatatccctacactggggagagaggtgaatgcaagtttgatccagagaaaatagcagttaagatcacaaatttcaccaatatccctgctgatgagaaccaaattgccgcatatttagtaaaaaatggtccacttgctatgggcgtgaatgcaattttcatgcaaacatacattggtggtgtctcatgccctctcatatgtagcaagaaaaggctgaaccatggtgtgttacttgtgggatatggtgcaaaaggcttctcaattcttaggcttggcaacaaaccatactggatcatcaagaattcgtggggggagaaatggggagaagatggctattacaagctctgcagagggcatggcatgtgtggaataaacactatggtttctgctgcaatggtgcctcaaccacaaacaacacctacaaagaattatgcttcttattag

SEQ ID NO: 854 - protein, 380 aa, Glycine max
MEAKRGHALMCLARVSLFLCALTLSAAHGSTTVQDIARKLKLGDNELLRTEKKFKVFMENYGRSYSTEEEYLRRLGIFAQNMVRAAEHQALDPTAVHGVTQFSDLTEDEFEKLYTGVNGGFPSSNNAAGGIAPPLEVDGLPENFDWREKGAVTEVKLQGRCGSCWAFSTTGSIEGANFLATGKLVSLSEQQLLDCDNKCDITEKTSCDNGCNGGLMTNAYNYLLESGGLEEESSYPYTGERGECKFDPEKIAVKITNFTNIPADENQIAAYLVKNGPLAMGVNAIFMQTYIGGVSCPLICSKKRLNHGVLLVGYGAKGFSILRLGNKPYWIIKNSWGEKWGEDGYYKLCRGHGMCGINTMVSAAMVPQPQTTPTKNYASY

SEQ ID NO: 855 - DNA, 1140 bp, Glycine max
  source 1..1140: mol_type = other DNA
atgggtttccttgtgttgcttcttttctccctcttaggtctctcttctagttccagcatatcaactcatcgttccatattggaccttgacctaaccaagtttaccacacagaaacaggtgtcttcactgttccaactatggaagagtgagcatggacgtgtctaccataaccacgaagaagaggcaaagagacttgagattttcaagaataacttgaactatatcagggacatgaatgcaaacagaaaatcaccccattctcatcgtttaggattgaacaagtttgctgacatcactcctcaagagttcagcaaaaagtacttgcaagctcccaaggatgtgtcgcagcaaatcaaaatggccaacaagaaaatgaagaaggaacaatattcttgtgaccatccacctgcatcatgggattggaggaaaaaaggtgtcatcacccaagtaaagtaccaagggggctgtggaagcggttgggcgttttctgccacgggagccatagaagcagcacatgcaatagcaacaggagaccttgttagcctttctgaacaagaactcgtagactgtgtggaagaaagcgaaggttgttacaatggatggcactatcaatcgttcgaatgggttttagaacatggtgggattgccactgatgatgattatccttacagagctaaagagggtagatgcaaagccaataagatacaagacaaggttacaattgacggatatgaaactctaataatgtcagatgagagtacagaatcagagacagagcaagcgttcttaagcgccatccttgagcaaccaattagtgtctccattgatgcaaaagattttcatttatacaccgggggaatttatgatggagaaaactgtacaagtccgtatgggattaatcactttgttttacttgtgggttatggttcagcggatggtgtagattactggatagcgaaaaattcatggggagaagattggggagaagatggttacatttggatccaaagaaacacgggtaatttattaggagtgtgtgggatgaattatttcgcttcatacccaaccaaagaggaatcagaaacactggtgtctgctcgcgttaaaggtcatcgaagagttgatcactctcctctttga

SEQ ID NO: 856 - protein, 379 aa, Glycine max
MGFLVLLLFSLLGLSSSSSISTHRSILDLDLTKFTTQKQVSSLFQLWKSEHGRVYHNHEEEAKRLEIFKNNLNYIRDMNANRKSPHSHRLGLNKFADITPQEFSKKYLQAPKDVSQQIKMANKKMKKEQYSCDHPPASWDWRKKGVITQVKYQGGCGSGWAFSATGAIEAAHAIATGDLVSLSEQELVDCVEESEGCYNGWHYQSFEWVLEHGGIATDDDYPYRAKEGRCKANKIQDKVTIDGYETLIMSDESTESETEQAFLSAILEQPISVSIDAKDFHLYTGGIYDGENCTSPYGINHFVLLVGYGSADGVDYWIAKNSWGEDWGEDGYIWIQRNTGNLLGVCGMNYFASYPTKEESETLVSARVKGHRRVDHSPL

SEQ ID NO: 857 - DNA, 1026 bp, Glycine max
  source 1..1026: mol_type = other DNA
atgagttcatttagccaaaatccctatgttttagttctgttcctcgttctcactgtgtggatatcccgtgtaatgtctcgcgggctcattacatctgagagacatgagaaatggatggcacaatatggtaaggtttacaaggatgctgcagagaaggagaaacgtttccaagtattcaaaaacaatgtgcagttcattgagtcattcaatgctgctggggacaaacctttcaaccttagcattaaccaatttgcggaccttcatgatgaagaatttaaggctttactaaacaatgttcagaaaaaggcaagtagggtggagacagcaacagaaacatcgtttaggtatgagaatgtaactaagattccttctaccatggactggaggaaaagaggtgctgtcactccaatcaaggaccaaggctacacatgtggaagttgttgggcatttgcaactgtggctactgtcgagagtctccatcaaataactacaggtgaattggtgtccctatcagagcaagaactagtagattgtgttagaggtgacagtgaaggttgccgtggtggttatgtggaaaatgcctttgaatttattgctaataaaggtggaataacaagtgaagcatactatccttacaaaggaaaagatagaagttgtaaggttaagaaggagactcatggtgtggcacggattatagggtatgagagtgttccttctaatagtgaaaaggcactcctaaaagctgtggcaaatcaaccagtttcagtttatattgatgcaggagcaattgctttcaaattttactcaagtgggatttttgaagcaagaaattgtggaactcatctagaccatgctgttgcagttgttggttatggtaaacttcgtgatggtacaaagtattggctagtaaaaaattcatggagcactgcatggggtgagaaagggtacatgaggatcaagcgagacatacgtgccaagaaaggcttatgtggaattgcttcaaatgcctcttatccaatcgcttaa

SEQ ID NO: 858 - protein, 341 aa, Glycine max
MSSFSQNPYVLVLFLVLTVWISRVMSRGLITSERHEKWMAQYGKVYKDAAEKEKRFQVFKNNVQFIESFNAAGDKPFNLSINQFADLHDEEFKALLNNVQKKASRVETATETSFRYENVTKIPSTMDWRKRGAVTPIKDQGYTCGSCWAFATVATVESLHQITTGELVSLSEQELVDCVRGDSEGCRGGYVENAFEFIANKGGITSEAYYPYKGKDRSCKVKKETHGVARIIGYESVPSNSEKALLKAVANQPVSVYIDAGAIAFKFYSSGIFEARNCGTHLDHAVAVVGYGKLRDGTKYWLVKNSWSTAWGEKGYMRIKRDIRAKKGLCGIASNASYPIA

SEQ ID NO: 859 - DNA, 2283 bp, Glycine max
  source 1..2283: mol_type = other DNA
atgggtccgtttcgtaaacccttccttgcatttctctcggttgttctatttctgggtctctatgaggcagcagcagaacagactcagactcacaagagtacttacattgtacacgtggcgaaatcggagatgcccgagagcttcgagcaccacgctgtgtggtatgagtcgtcactgaagaccgtgtctgactcggcggagatgatttacacctacgacaacgccatccacggctacgcgacgagattaaccgctgaggaagcgcgtttgctccagcgccaaacggggattctggctgttttgccggagacgaggtacgagcttttcacgacgcgaacgcctttgtttctcggacttgacaagagcgccgacttgttccccgagtcgagttcgggaagtgacgtcatcgtcggagtcctcgacaccggcgtctggccggagagcaagagcttcgacgacaccggactcggacccgttccgagcacgtggaaaggcgcgtgcgagacgggaacgaatttcaccgcgtcgaactgcaacagaaagttgatcggagcaagattctttgctaaaggtgtagaagccatgcttggtccaattaacgaaaccgaggagtccagatccgcgcgcgacgacgacggccacggcacccacacgtccagcaccgccgctggatcagttgtttccggcgcgagcctcctcggttacgcctccggaacagcgcgtgggatggccacgcgcgctagagttgctgcatacaaggtatgctggaaaggagggtgtttcagctctgacattcttgccgcaattgaaagggcaatattggacaacgtgaatgttctttctttatctctcggtggtggcatttctgattattacagagacagtgtcgctattggagctttttcagcgatggagaaagggattttggtttcatgctccgctgggaactcgggtccgggtccctacagtctctccaatgtggctccatggatcactaccgtaggcgctggtacactggatcgtgacttccccgcatacgtggcgctcggaaatggactcaacttctccggcgtttcgctttaccgcggtaacgctttgccggattcttctttgcctttggtttatgcagggaatgtgagtaatggtgctatgaatgggaacttgtgtatcacgggaacgttgtctcctgagaaagttgctgggaagatcgtgttgtgtgaccgtgggttgaccgctagggttcagaaaggctcggtggtgaaatccgccggagcgttggggatggtgctgtccaacaccgccgctaacggcgaggagctagtggcggatgctcatttattaccggccaccgcagttgggcagaaagccggtgacgctattaagaagtatttggtttccgatgcgaaaccgacggtgaagattttttttgagggaaccaaggtggggattcagccatcgccggtggttgctgcgtttagctcaagaggtcccaactcgatcacgccacagatcctgaagccagatctcatcgcgccaggtgtcaacatcctagcggggtggtctaaagccgtggggcccaccgggttgcccgttgataacaggcgcgtggatttcaacatcatctctggcacctccatgtcgtgccctcacgtgagcggcttagccgcgctgatcaaatcggctcaccctgattggagcccagccgcggtgagatcggctctgatgacaacggcttacacagtttacaaaactggtgagaagttgcaagacagcgcaacgggaaaaccatccacgccgttcgatcacggttcgggacacgtggacccagtcgctgccctcaatccaggactggtctacgatctaacggtggatgattacttaggttttctctgcgcgttaaactactcagctgcggaaatcagcactttagccaagagaaaattccagtgcgacgcgggcaagcagtacagtgtgaccgacctcaactacccttcgtttgcggtgttgtttgaatcatcagggagcgtggttaagcacacgaggactctcactaacgtggggcccgcgggaacttacaaagcttccgtgacgtcagacactgcgtccgttaaaatctcggtagaaccgcaagtgttgagtttcaaggagaacgagaagaaaacgttcaccgtcacgttttcgtcatcgggttcgccacagcatacagaaaacgcttttggaagggtagaatggtccgatgggaagcacctggttggatccccaatttcggttaattggggttga

SEQ ID NO: 860 - protein, 760 aa, Glycine max
MGPFRKPFLAFLSVVLFLGLYEAAAEQTQTHKSTYIVHVAKSEMPESFEHHAVWYESSLKTVSDSAEMIYTYDNAIHGYATRLTAEEARLLQRQTGILAVLPETRYELFTTRTPLFLGLDKSADLFPESSSGSDVIVGVLDTGVWPESKSFDDTGLGPVPSTWKGACETGTNFTASNCNRKLIGARFFAKGVEAMLGPINETEESRSARDDDGHGTHTSSTAAGSVVSGASLLGYASGTARGMATRARVAAYKVCWKGGCFSSDILAAIERAILDNVNVLSLSLGGGISDYYRDSVAIGAFSAMEKGILVSCSAGNSGPGPYSLSNVAPWITTVGAGTLDRDFPAYVALGNGLNFSGVSLYRGNALPDSSLPLVYAGNVSNGAMNGNLCITGTLSPEKVAGKIVLCDRGLTARVQKGSVVKSAGALGMVLSNTAANGEELVADAHLLPATAVGQKAGDAIKKYLVSDAKPTVKIFFEGTKVGIQPSPVVAAFSSRGPNSITPQILKPDLIAPGVNILAGWSKAVGPTGLPVDNRRVDFNIISGTSMSCPHVSGLAALIKSAHPDWSPAAVRSALMTTAYTVYKTGEKLQDSATGKPSTPFDHGSGHVDPVAALNPGLVYDLTVDDYLGFLCALNYSAAEISTLAKRKFQCDAGKQYSVTDLNYPSFAVLFESSGSVVKHTRTLTNVGPAGTYKASVTSDTASVKISVEPQVLSFKENEKKTFTVTFSSSGSPQHTENAFGRVEWSDGKHLVGSPISVNWG

SEQ ID NO: 861 - DNA, 2033 bp, Glycine max
  source 1..2033: mol_type = other DNA
tgatatgagttcgattcaactaacctttgtggcatttcttttgaaattgtattcctcccacactactttatagaaactgttttaaaatacccgtgtctctcttattgactttctaaaaataagaccatcatctttctagcttgttcgcactaagttcggttgttgaacttaattgcctgagttggtcggaacatgatacttcattttatggaaaattaataagatgatttttttttatacaataatatgatatttttcaaagtatttgttagaattaagtaatgaaaattaagtgaaccttttaatgtattactttttctttatatgttttttaataataattttttattttctttatcagtatcctaaattagcatttggcttatttttctgattagaataatgttgtctttactcatgagattaccttgtttattttttctagtcgaggtgacattaatttcctggaggaaattatttgagttgaatgtagaaaatccgcaatgaatgcagtaaagtaaccgcacgcaaagaaaaggcgtgtatgtacgtggactgagtatgactggatggaagcttgtaaaggcttctctaggagattttattttaggtttttaattatgtagtgctatattatttttaagattttttaaattttttatttcaataataaattttattttgaaattttaaattattttttatagatctcaaaagagatctactttttaatatttatttataaattattttaatgaaaactaaataatggaaatcatgggaaattaaagtatgttgtaatcagtaatctaagctgggctccttctcatgcgacgaggccatgccaattgggctggtatgactctgttggctcagagttgtcaacaattacttggtcaggtccagaaaggtgtattagattgtcacgttatgtttgatcatttttcaaatcttaggtaaagacattacttctaactctcacaaaataatactataaaatagtattaattgtaaaataatagaaaataaaataaatattacaataaaaagcactctaactcataagctagtagaatttcaggtaaggttaaaactaccgcgagaagtgagtgagtacttaaaaaaacagtctaaaacacaagctagtagaaatcccacaaaaagtaatatgtattaaataattatttttcacaatgacattgatagtgtatacaagagttagaggtggtatgaatttcctagcactagcccatggcctctcatggacaatgatatttttttgttcaaaagtgtatcttagcgttcctgctatgaatttaatttcagtcaacactggtgattttgagttagttttattattgggcttggaaagatcgttatatagactgaacttaagctttaaaaaaattgaatacattttttaaaaaattaatttatctttaacagttacatattaaaaatattgtaataagaaaaataatataattgtaagatgtaacatacataaatttaataagaaattaattaaaaaaaaacattgacaatgtaattcaatagataattttaaggtcagaaacaaattactctacttcaatatttgtgaaattaagaaagaaatccaagacgcagtcatttttacttgaatattagttaaaattaatggaaaagaatactggtgaatgctaatagcataatcctctctgattgaaggaggcaaaattggttgaatgtagaattgatttgatcgaagcaagtaaaataatgatgaactctcgcaatgatcttttgtgtttaaatccatttccattttacgcagtgtttgaggggaagttaattaaggttgatagaatagaaaagaaggggacggttaggcagagtcctgtgcggatcatgagcttaacctccagtcaactgagcttgagaagctaggcacgtgataaccaacacatcacgttgtgttacatactagtacgtagtagtattatatataccctaaggactggaatggggtcttcagttgagagttgaaagac

SEQ ID NO: 862 - DNA, 1884 bp, Glycine max
  source 1..1884: mol_type = other DNA
ttgccttcacatcgtgttcttagccaggtacaagtactttgtttcgtttcccgtaggtttctcacatgtcttgtgaactgcatcaagtgtgtgcccacgtggatctcttctgtttgccatgggttatcacgtggccagaggtagctaatttcctgcggtttggaatttcacacgtttgtacaccaagtcaactgaaactcttagatgaatatcaaatgaaataaaatgattcctattttattttgacaccagtttaagtgtgtttttggaagagcgtgtgtttgatatctgtaaatttaattgattttaaactcaagtaatgaaaatcataggaaattgaagtctgttgtaaacttgtatcagtcatcctagctgggctccttctcatgcgacgaggcctgtccatcttgggctgagatgactctattggcccagtgttgtcaacaatcacttggtcaggtccagaaaagtttatttcatatttaaaacatggatggaattatgcaaattataacatttatattataaaacaacagaataatatcacatcaattcctcacacgttgcacttccctttgttttctcccattgcccaattccaattacagtatattttctttacattcttttccgttgttgaccctcgactacttttaactctcacaaaataatactataaaatagtaataattgtacaataaaaagcactctaactcataagctagtagaaattccaccaaaagtaacatgtattaaataattacatgtcacaatgacattaatagtatatataggagtgagaggtgggatgaattttctatcactagcctaaggcttcccatagacaatgatattttgttttaatgtagcaaataacaactttacgttttacttcaatcaacacttgtgattttgagttagttatttagtttttttttattggacttgcaaatatcattatatggattgaacttaagcccaatgtgtaacaaaaattaataaaacttggtcaaaaaattgaatatatttttttaaaataatttatctttaacaattacatattaaaaatattgtaataagaaaaaataatatatttataagatataacatacttaaagttaataagaaattaattcaaaaaacattgacgatgtaattcactattggtgtaaagttagttacgcaggaagagcactaattctagataattataaggtcagaaacaagttactttacttcaattttgtgaaattaagaaagaaatccaaacacactcaatttattagaatatttgttaaaatttaggcttaaatatttaacttacatgataaatgatcaaattttattataaattttcaatatattgaattttttatttaaagtctctgataacatcataaccgttgataatattggaaatatctaccatttaactgaaagcaaaaacttgaaataaaattttaaatatataagaaactcaaaataataataaaaatatttaaaacccaaaatcaaatgtgataatttatgggaaaccttaaacatatatttgagcttaaaatttatgaaaaagaatactgctaataagtaataacataatcctccctctcccctctctgattcaacgaggcaaaattggttgaatgtagaatttatatatttgatcgaagcaagtataaactctcgcaatgagccacaagaagtgggaagtgaaagaatgagacggttaggcagagtccatgagcctaacctccagtcaactcactgttgagtttctgattgagaagctagcacgtgataaccaacacattcacatttgcttaccattactattatatataccctaagaagtgggatgtggtcttcagttgagagttgaaagac

SEQ ID NO: 863 - DNA, 1062 bp, Glycine max
  source 1..1062: mol_type = other DNA
ttctttctcttatggtatttttaaaattttatttaaactgaaaaactatacatataccacatgctaatgaaataataaatcaagaagagtaatattatattatcaaatgattttacaatttttttccctttacatcacctatacagtttgacgcctcgcacttttactttgttatcatgtttttttaagttctccccccttttattattagcttatatggatacaatcaatcaaaataaattcattagatttaattattgtttcataaaaatattagaatttagatgatctaaatgttattttttaaattctcttttgatcaatcgttgaattgaatgtgactgaaacggaaatctcctttaattttacataatatatttttatcccacgtcataaagataaatatcatatagaattcgaagattattttatagttgtcttaaatggctaagagaaattgtatgacagtatccaatcaatatcatcctctaattaatgacttctactggccatgaatcactcctttaatttgttttatctcatcttaacttgattgtgatagctagggcctaggggagtgtaatttccctagttatcattagtgtctcgtctcatgagtattgccatcctttttcttgggttataataagagtacaatgtacaattaaacaaggaaaccagaaagaaaaaaaagaaagtacaggatcactactagccgtcctaaataagccttaagatacataagtacataatagtcaaacaattgatagagccaatggtattcataaatatccaaactgtttagtttaagttttctgttgtttgactcttagagcgaagaagaaaggtagttcagtagaaacgtgtctaccaacaaaatttttacttaggtgttggagagttaattacttagttacgtactgatctatctggctcgcttccttaaccatgaggagaacaattcttataaatgtcggaaagataggtctgcaattatattaaaagtgaagggaagcaaataaaataaaaaagtgaagaaagaaattagaaaataaggagaga

SEQ ID NO: 864 - DNA, 2073 bp, Glycine max
  source 1..2073: mol_type = other DNA
ctcaacagacctcacaatatatctaactcttttttatattttgttattaactttaatttaagtaatatatttttactttaaaatttagacatgaatatattttttgttcctttattttttaaaatttccaatttttgtctctttattttaaaatacaaacatttagtccccttaattttataaaattcatgattttgatccttaaaaaatattgaccgataagagattaactatgtgacacaaatttagagatatactagattatttatttaatccacatcatagtcaaccttaaccatttaatagtgaaggcttttaatttgattgaaggaccaaaatcacaaactttataaaattgatggactaaatatctttattttaaaataggagaactaaaattctagatttaaaaaaagagaaataaatatctctattttgaaatataggaatagaaattgcaaattttaaaatatagaagaaccaaaattatatttaagcctataatttaataaaatatatgaaatttttaatttttttatcgacaaatgttaattgttatttattatattttattggtaagaaagattcaaagtgagacttcttttccttccttctttccttattactaagtcaaccttataatttcattgaataattttaatgttaaaaataataactatattattatataagttttgaaatgtaaaaataattacacgttaaaaatttcatgttataattaaggttaaatgaatttgtaaactaatcgtgaaaaaatcaattgcttaatttagttagttacgtgaatttgtaaatattggggtaaggggaagcctgaagaggctcgtgaaaaaaaatacgtggattgagcaggtatgtaaaggtgagaatactgattgaagaacttggttgacaatactgggtttaaaacttgtaaaagctagaatacgggctaaagatgtgtgaatacttaatgcagattttaaaatgtaactataggattcagtgactaattaagtttctatgattaatttttcgtaacattatttagacagaaagacctaattaaaaaataaaaataaatttaaggattcaattaaaaaagaagttaaaaacttaattaaaaagtcaaatactttaaagttctaatcagaaattcaacctaaaaataatatctacattacacattaatatgacttttaaaataatcaataataactttgaaatgtaaagcactgtaggatgaaaacaaaaacaaaaaaaagcaaccgtgattaaaaaaagcaacagtcatttagcacctctaatgttaatttctgtatctattccagaatgtaaaaatatttaccttctgaaaagctattccaaaatgtaagttgttccagaagttaaaaaaagtgcagagagcaacattagagttgcaggaaacaattatccaacattagagcatacacacggaatgatacatgtgtactcgacataataatcgtctatagctttgcagccactaatcgtaatgaggatttttttttatatagtcctcaattatgtaaaaaaatcagagtaataaagaatactctaaatttaagaaaatcgaataaattaactttaaaaaaaacttaaaagtaaataatgattcacgatatctcaaaaattatgaaaatagaaaaatatattttttaaggaaaatagaaaagaaaattaaacaataacaaaactgtgccatgaatgattctttcgattaatagggtggattattggattgatataaaaaggttcacaaaaaaaaaccatttctatgaagaaaatgaatatatttcaatttagaatatattagtttttcttcctgtaatttatatagcattgaagtttgaaggcacttaacatatatgtgaaaacggacgtggtggtctctgcatcaccaattctacctacctaatttaaatgagacttaacccaatgttcaacttttcaagggtggtgatacccaactttccgtgccacactttccatcaagagtactgaaaccatataaaaccttaggccacattcatagttgtagagaagcttgca

SEQ ID NO: 865 - DNA, 1903 bp, Glycine max
  source 1..1903: mol_type = other DNA
atgcccctctataaatgtgtgacaaaacatgtgattcaaacattggttatatagtttactatatcatttttttttattaggaagtatatagaattttttatttaggattcaactaatcttacttccaacaagttgactcattttaaaagtaaagtgatacttctaattaggatttaaaactcaaatcaagaatcaaattctaattttttttgttaaagaattcaagtattaaccatttatactaacaacttatgagtgttggtcgatctatgattagagagtaaggctatatatgtttagattaaagttaggaaaatacttttgtaaatggcgaaatataaatgcagtgactaaaaaactttttattatagctataattgtggttaatgtgatcgtgtaatttaaaactatggttagatgttaaaaagattatcttagagcatctttgatggtgttcatataggaacatcattatcgcaagctagagaagcactcccatcagaggaagcaatgtgcttgcgagggaagtcccaatgcaggtgcatacaacgattgcttcctgaagtaacattgctatgcataataaattaaattaaaaaaggaaaaacctttttttttcgcagatagtatttttttggtgcagaaaagcaaaacctctaaaatagagtgcaatataacggatatatttctagccattaaaatttgtgttgttaggcaacggatatatttttttcaatataaatagagtgaaatgtaaaaaaataaaattagactaacaaaatctctaaagtttgcctcatttcattctcaacttttactttgatttgttttcatggatcgaaataaaaaatcccgcaatatgaatctgtcatttaagttcaccccaaattctcaaggtttttacaaatctaaatttacaaaatttttcaaatttatcaaactcacgaaataatctaaatcaaaatatgacaaattttcaatatcctatacttctatttcatccatatcaatttagtatttatcactcaccaccaatttatccttccatggatgaagaattttcaatgggtactaacaatgaacaatatattgtgtgaagttagttgctttcattattttaaataaaatatagtttaattatatttatatttatatttatatttgatttttaaattttaaattttttaacatccgccaaatatatttaacataatataatgcactaaaaattcttcattataaaatcattttcattaaataaaaaacaaacaaaagtttggatagttgaatatgaataacgtattaaatatgcataatttgaggattcttataattaatatctgttactaaaatgttctcatttttaatatttccttaattaaaagttattactttttactagctggatgcaagttaaacgtgacgttatttttatattatctgtatttttggtgtttaatattacagcataaaacaaaaattagctaggcctttaattaattaactttcataacaataaattaagaacatctttaatgaaattcaccaaatctattattatatatattctggagatcactagggaagttaggttccccttaaaaactgctcccattttaaaaataattattgtttaatgtctctttctaattaattaattaattaattaattaatatatattttcaatcgaggttctagaatttttgattggtaggtaaatctcactcactagtaattctttggtctcccctcactcctatcatattaatatgtgtgcaagtgcaactactataaaccccaccaatgcttcccattccttttccaagtcaacccgagagagaattaagattttataatttaactgttttggggtgtgattaaaagagaagctagctaaaaaaa

SEQ ID NO: 866 - DNA, 2007 bp, Glycine max
  source 1..2007: mol_type = other DNA
tctcatgcttccatagtcgcacaaaaattagtattgtgagccaatcctatgtatatatgtatgacatatcaaaaattaaatataaacattctatgctcacgatttaatattattatttaaaaagtagcatgacttttaaatattatcaattttaataaatatatatgtaaataattagtctagcaaaaatatttattatcaattttatgtataaatatatatgatgcactattaaaataaaaataaataaatatcaactaaaaaatatatttattattattttattttcttttatataatagattccaagggagggggccaaagcccattcttatccctcttgaatctgtccacacacacataattttaaaatggaagaccattgtggatttttaaaaaatatgaatattaaatatctttattttaaaatagaatgattaaattgtggagtttaaaagataacacataatttttactaaatttaaaatcaattaagtcaatatttttaattaaacatattatatttgaatatttttttcaaatttaaaatcaattaatcactaattttaatttaataaattaacttttaatacattaattgttaccaaatttaaaataaattaaaaaaaataattataattaaataaattttctcctaatacatattaatttccactaatttaatttaataactcagattttttagttaacaaggcatattaaaataaaaatacttattcagagtttgactttcagctcgacgcgtctatccaaaaaaacaaccttccaatcagcttatgcatgcaagctgcactgcagctatctctatctgtcttttcatgaaccttttgtccaagagttagaaattcaacttttgcattttctttaccattaagaaaatcgttgtaacaacaagtaacaaaaatatgtgaatattttatgggcaaatactcattttttatttgaatatatacggtgttgataaatttattcttgaaagattgaaattttaattttaattttcgaaagtgaaaaaaatacgacaaattcattcatctattaattttcgttcgctgtcactaatgaaagagttcgctgtcactaatgaaagagtatacttgacacatttatgaacgaatttgtcagtattttacgtatctagagacgaaaatgatcatttatttaaaatataatttaatctttacattttctttttaaattgttataagcataacattataacacacacttaaaaagtagtaaaaaaaacataatttagaagaaacataataataagcataatattgatgaataagtataatctttcaatggttttgaaatttctattatgacaacattaagtaataataaaattaagttgagtctcatttttttgtaatgatgaacttaattactgaatatttttgtttgagtttcatattttggataaggtactatcatattaaaaattttagagtaatatacatagacaaattatgtttattaatcaatattgtacttattattatgtttgttctaacttatgtttacttttttataatattatgtttctaacgattaaaaaagtgaggatgatgaagattaaattatgttttgggtaaataattatttttctccttgaatatatagagtgttcacaaatttatccttaaatgtgtgacatatactctttcagtaacaaacaaaaattaatgcatgaatgaatttatcatatatttttatttttgaaaactaaaatttaaatttttattttttcaaaataaatttatcaacacggaacaaaaataactatttacctatattttaacttggggcttgtctgttggagtattcatatacatcaagagtatctcacgcgttcccttgcgtgtgggagagtttctctattttgtgactgacctgagcagtgtttaaagccggtagagcgaccccatattgcactgcaccttatctcacctctctttgactgttctccaccccagggta

SEQ ID NO: 867 - DNA, 2116 bp, Glycine max
  source 1..2116: mol_type = other DNA
cggtgttctgagaatgggcaagctaatcttcttgatccattgagaacctaattttcattatttttttacctaaacataaaaacacaaaaatataagaaaataaaataaaatccttatctaaattcagaacataaaataaataacatctttcatgttaatattttaaaattcattattttgaagccaaaatgggttaaaatttataacaagtgacttaaaattaaaatttccaaaaataagtagaaaattagataatttaaaaattaccaaactcattttatccttcatgactgttatgtactgatgcagtgtaattacccacattataaatggtaattacaaactagtactaccttataaattaattacccccattctcctatcttacaaataaaattaaaaatacggacaaacatggcagtggtgtggtttcgctttaaaaataaaaatatacaaacatgaaagtgatgtgttttcgttgttatatataataatgctcacgatcgagactcaactaaatgatcacgcaaatgtttttcttaggatgaagcctgttgctaatttcttcatctcaaaatccggtcattacgcaatttatagatttgtcgagattttggcttcttctttaaatttgcgcataaaaacttatcaatgtataccttatggctgcatgaaattacctattcttatggttgcatattaaatgttcatactttttatattattttatttagattaaattgtaattttgatccctatttttaaattaaggcattccattaatggaccatttatgtgacaaaagattaaataacttaaaaatacaaaaaggtcttagtataaattaaatttaaaatattttatataaagataaaataataaaaccataaaatacttactttatttagttaattttataaatactattttacatgtatcattaattagtccagaattattaatttttttaattataaaaatttataaattgaaataaaatatttaatatttaaatatatttaacatttaattttacatgtacttatttttcttataaaattttattttaaaataaatcaactaaaatttgttgttattttagtataattttaaaaaaatacataaactaatatatagattattttaaaattattttatctaatttatgaaaattaagtagatttaaaataacatttaactaatctaaaatttaaaatttattacttgttataattaaaataaactttttcattatttatatataaaaataaatgtagataattttatcaattacataaaataatttatataactaatttacatattaatttatttaattttcctcatttatataattgatattgaaaaacttatttactaaatattttttatagttaaaataaaaatattaacatgtttttttcctaaaaacattaaatattcaaattttattcatttatttaattaaaataaaggtaatttacatattaaaataaattacataatttgtataatttatatattaataaaaaaatatataaattaatttaaattagtcaaataaaaataaaaatatataaactattcaatatatatatatatatatatatatatatatatatatatatatatatatataatataatgacatacaagaaaattaaaaggatttataaaaaggatttatatattaaatattttttaattcataaatttttataatttaaaaaattaactcatacataaataatatttaaaaaattagttaaaaaaataaatatcttaatagtttgttattttaattttaaataagagattataagtttaattcttattattttttttcataattttaactcttaccaagtatttttttcactttgtttaatctctattctctctctctttatatatatatatatatatatatataataaatttctaatcaactaaatagtgtatattttacatgcagagtacataaaaattaaaattgggtataatagttattgtacgtcatctcactcactcttcctcttagagtctatatatatgcaatatctctggtctccctatcaccttctcttctctaagcactttactttttttttcagcc

SEQ ID NO: 868 - DNA, 1990 bp, Glycine max
  source 1..1990: mol_type = other DNA
gatcatagcattaacgtacaatcttcagtgcgaaagttatccaatccattcaaataattattagagtctgggccatgggcgtacgtactatgtaacaacatactagtaacttacacatacaaatgcaatggactttcactcacttcaagatataccaatttgtacgaggctagatattaattaattgaaaatccgtgttagtggaaccctgtgtggacactttttgttaccagtgccacgagatcagatacattaattttgtgaccccatattttatttgttctttaattaagcgtcaagacaggtttgactgaattatttcgaccaagataataataagaaggctattataccctcatgtttatactgttcatgataatatgaatccatcaaaggctctttagttttctctccattatcatccaaaaatttgtcgaaaacaaagctaacttttcacctccatctatgtaaccgatggcgatgatgttacccatattttgactaacttatttttttattgatttagtcaaaaagataaattattcgcactaaaactaagagagtacattggttaagagaatattatttttttaccatctaactaacttttataatgaaataactaaaatttaaatatagtaccatagtatatagttaccgaacatgacatatagcatcctgaattggaaattgtagacgagctcaagtaatgaaagcaatcccaaattcccaatcattgagagaaaaaggattggatgaaaatggcaaggcaatacggcgtgtggtctggctttggactccaccaataaacgaattacagcaggacgtggcggtacataaagaaagaacaaatacaaataataacaaatattgttgatgggggtattttttttcttgtcgtactccttcctattgcatataactgaaagaaatggaaggcttgaatgggggggaaaacgagatgcctttgacacacgaaaaaccttcaatttgcacacaaaaaaacagctagctcacactatgagacaaacgagtaacagaacggcatatatagaaagtgtgtcacattcacaccaagagaagagagagagagagagagaggtgaagtggtgacgcaccatcatatcatggcatgtttgttttgggattcaatgcataggccttcccatcccaggggatgtttggtttcaaaggttcacgtgaatccatccctacccctacctctaacacactccccgtatctcaatgtcaagttgcacaatggcaagaattgcatgtcaaatgccatcaatcctaattatacatattcttaaagttctctgacttatccctccaaaattaaaattaaaattttctatgtacttaaaaaaaaacatgattgatacatttttttaaaaaaaaattacataaataatttatgataaaattaaattatttttcaagaaaacctaactcaattggattgttgagcagaatatacttgagtcgttataaattttttgacacggttttttattcatatcaataaaaaaatattaattccattttcatttgaaataaattagagaatgtggccttaactatatgcatctttacgttgtttctcttgatttcttctcatcacaacagaaacaaaatgaaacgaaataaacagatggcatggcaagagacgttacaatattccactagagattgtgattcaaaaaattcttacatatagagaaatgaagtggcacgtggagagtcctgagttggctaggcaaaatggtttttcgctacgctacctactaaaaaagattaatccctcatgaaggctgaatgaatgacttgatattacgcagtacattcccgtttgtgtataaataggaggagggagttgctcatcacatcctcattcgatcattcacgagattgaggcgggggttgatttggaagaaacccagctaaggtaattcctcgcaacccctaactaaaccttcaaaggatcatc

SEQ ID NO: 869 - DNA, 1926 bp, Glycine max
  source 1..1926: mol_type = other DNA
gttagcttatttgtgctcttggactccttcattaacggtaatagatgaatgaatttattgcatttctttcacttttgattactaaaatttaaattttcatttttcgaaaatgaattcgttactattttatacatttaaaaataaaaatgattatttcatcttataattatcaaataatatgcctgtgatgatgatttttttcaaaaattgaaaatgtcttattgcctagttaggctatagaatctttttggctcatctcaatcgcatggcgacatggttaccgcgttcattgggtaattatatttatgtatttaaattaattctattaaaaccaattctattaaagctgaaaactaaaatgacacttaatttctgtaagagtcgtgtaattagcgagccagagtaatgcaaccaaagagcttctttccccaccttaattcctttataatgaatttgattgataccatacatagctaagcttttttttctttcgatttacatagccaagctttagctgctatatataatatgttgtttatataattttgacatgttgcattacatgttactaactggttgcaacctccagttttggttatcgaatatatgctggccggcaccaactacaaaaaatttctgtatggctggctactaatactatatcttcaaatgtctcactttacatggactgagtgcataacgggcaattgcagtgctcataaggaatacgcatgcaatcattttatcatcgcagattgttgcttttccttcactgtaaaaaaaataaaaataacaattaattgagcaccgaatgaactagaccgattgcatgcattataatacatgaagaaaattatttatactaatcttttgtttcaagttttaaagttgacttttttgttttacaagcacaataacaatcaaataaccaataatttaatcattaaaaagataaacaaactcattagataaaataataattatgataaaatatgtttaagtcctctatatttaagttgaattttgtttttagtctttcaaattgtgcattttagtctctgaaattttattttaaaaaaatagtctttgggcttactctccaaaatttgcacattttaattttaggttattgattaaagattaaaaacatttttttttatcaaatttagggaccaaattacttgatataaatactcaagaactaaaaacaaatttcaataaaaatataagggattaaaaatatattttattctgataactaacaatcatcaaattttatgacaatcatatgtaaccttttataatataattgtaagaataattaattttaataaataaataaataaatgagacttataatagtaaatacatatgtttgcctaggtaataacaatgataacaagtaatagaattatcattcttattgtatctattaattaatatattattagatgtattaattagtatatatattttttactataaatagtatatattattaattattatacatttattaaagtatattcattaaagattttgagggaggggagctgaagccactaacccccgtaaatccgtccttgcacaaaacacgacatgagaatggttttgtatactccacaatttaatatccaataaaataatttcttttttattttaattaggaaactccaagattgctttaacttatacaaaatctgaataacacaaaaaaataaaaaatcggaattaaatgttgcccgattgttgactaacttatacaaaatcttatttaaatgcttaaaatcgtgtcataatataatgaatatatatttgcaaatatatatttattatataattgcaaatatatattctaattttgagtataaataacagcatgtgagggtgcagcaaaacacacactgagtgcaacaaagttttaac

SEQ ID NO: 870 - DNA, 1077 bp, Glycine max
  source 1..1077: mol_type = other DNA
tctctgcatacaatagtgattaataaaaaaaataaacatgccaaaaaatatattgaaccattagacaaaggcagaacacccaaaaaaatttaagcttttgtcctacgaaaagtcataacacaaaacaaaggcagaagacgcaaaaaaattgaagtttttgtgttgcaaaggaagaacaatagtcagccagtcaaataagcccgagaaacacaaaaaaatacaattttttggaccgtcagaaccacaaaccaaaggagaaatcaaatacatcacgtagaaggataagatagaaaagaaccaagaaatcatttttcggccaaaccaagcaaagaactatcaaaccaagcaaaaaggtttcagcctttgggttttcctcacgggagagaaaacggttttaccaagcaacaacctttcggttttttggccaaaccaaccaaatgaaaaaagaaaacgcagcaggataggagagaaaagaacctagaagaatggagaggaacaaaagattcagaagaatggagagaaatggagaagaacgaaaatgaaaaacaaagagttgagaagcaatgggaaagagagaggggttagaagcaaaattcaaaatgaaacgtatgttgaaaaatacaaaaatcttggaaacaaaattagtgcatcgataattgtgcaacacgttggaaacttaaaaatagtaattatttattttatttattatatattaattactgaaaacgcattgtaacacgatttgacatttttaggccagaattgcattgcactacagcttgacacgtaggtcataagggtcttgtttgtatgatgatagatgattaataaagaatcaaatctgacattgtagataaactgaaaaatcaaaaaatacaattttgtaaaaaaaaaaaaaaaaaagattcatacggtctagctctgtagattttcgattcctacgcaaaatccatacggtctgaaacatcacgttatcgttttgttcccgtccaacgtacacatagtgtagcaccctctttataacctttcacacttattttcacccatctctggcactttcctcccagagcatatagc

SEQ ID NO: 871 - DNA, 1167 bp, Glycine max
  source 1..1167: mol_type = other DNA
agggagtaatatttaagtattaattatctattttattatatttcttgacaaaatattttatttcctttttatagtattcattacaaaaataataacattatttcttctttttagacaaatatactatatttttaaagatactattttttcttttatagtattcatcattgaaataattatacttttccttttttaaaacaaaatatttgatgttattatttcatttgttattatcttttctttttatattgtattatctttgttttaaaggttataaacgtttacatttctaaccaaatgaccttattatctttcttttatatttattttgttataattgatttaaaaattaaattttatttataattacaataaataagaaattgataaatttaattttaagacatactaataattatttttttctcttatctcattatttttgttgttattgctagctccaatttaattttaactttgggtgcagagtataatttcaaattcatgaaactaaacatcattatataaactctgaaaaacaaactaaaatattaaatcatatcaaacatttgtcaaaatttactttaataaatttggagtttttttttataaaataaatagttaatttttttattacataatcatataagttatatttttcccttagttctagttcttatgtcgggttcgtctttggtatagtggtgtaaaatcttgtattcagaaatttaaaaattttgtatttaacttaaaaaaaaaatgaatcaatgaaaatcacaagtcacaagtatgattaatatatgacttagtgacttagggataaaaaaaaaaatacataaattccactttcacattttaaacttttggcatggttgaaaaagggaacaaatgaacagagcaccatggtgcatagtgatagaggtacatgtgcatgccccatccatggccccatagatattgataaattgccaaggagacatacaattttatttcccattttatcttgttatgggaattcaaaaccgccattgtccacaaacgtggcctataaatggagctcattgatgtgatgagtgacattatcttttctcttcacaaaaacaaaaacaaagtaagagttcactcactctcactgtgttgtgagttgtgtgtgagcaccaaccaaca

SEQ ID NO: 872 - DNA, 1915 bp, Glycine max
  source 1..1915: mol_type = other DNA
tattatccaattgcttgagtattgctatcaatctatatatatgaaaatctgaaagttcaattagttaagtatatgcacgtaatatctgtaaccacctttttaatttctagccagtatttgcacctacgtagtgctcttaataagatgtttgtgtttgatctcatgatgttgtaagggtattatcaaggaggaattaactttttcaaggtacttctgttcaatatagattgcatctgctgatttgaacttgttattggatgcactttattattttttgttgtaatatagtttgacaacctagattaatttatgatgatccagacgttgttacccttactagaagcagccaagaagcagcaaaccagataaaccgaaaagatactcactgggagggtgagtctattattatatctacaaaaaaatttagttgttaccaaaaagaaattcacttggaggaatgcaaggtgcttcagtcaaaatacaggttatggttacacttttagtttctttgcctacataaattaccaaaattctgagacctggccatattgcctgcaatattctgttcgacatttgcaattagtttattggaaccttgattaatgtatatctgactcaatttataaaatttaaaaaagtaataagcttctaagttagcctcatctatgctgaagagggatccccttactttggcctcagttatcttttttgtgacttttcctctgttccattggcattactctattttacatcattggatttttcatacccaatgtgatgagtattttatatttgatttttctattattaaaatcatatgtgtaggctgcagagaggctcatttgaagtgaagtactcgaaacatagcatgctagttcaagcttcagtgaaatgttcttttgatttttttacttccttcataatcttgtaataatttcttcattgaaacagaatctttttattgaaaaatattcctacatattggcctaattctgtaaaaccttgctagttgaagctatataataatcagtctttagcggcattcacctatattgccggtaaaagaaaccgcagtataaaatacgctggtttaatttaattgcaactagatattttagcagccatatgtattgccgctagccgaaaggtacttctggtattgcgatcatggactgcaaatttgtgtccatcgtagtcttttaacatgcatataatattaaaaaaaatgcaatattaattttaaggaggtgattttgttcaagacagtgaagatcactgtagataaaactctctctaactcttcaccccaatccaagtcacatatgatggcttcttcatatatttttatcctaatcccatttctcgtcttcttggaatacaacatcctttcttattatgattctatgtgaatttgtgggaccccactacttgcaagattgttgttagcacggatgtagtctttgcagaaaatgaactacaaagtgaccacactagtgcaaaatagggatttaacatagcactacgtctccacccactcttattcaacacacacatattctctccatagacaaacatgatacagaaattccttctttcttatctcttattttagcttcgagttattatctttcatcaaaagcaagagtattttaaccgagtgagtccaacaaattagcatggcacacttcgttcagtaagaatctgattagaattgaaagttaaaggttaattgtgatcactagctactatttggtgcactgtgaaaaataaacacatgttgatgaacttgaaaagagccccttgttcactataaattagttgtggtagtttccactgccttagctgcaaactaaaccaattttcttcgtctgtgtaacaaacacttcaacaatctactctatacccgatttacaag

SEQ ID NO: 873 - DNA, 747 bp, Arabidopsis thaliana
  source 1..747: mol_type = other DNA
atggagggttcgtccaaagggctgcgaaaaggtgcttggactactgaagaagatagtctcttgagacagtgcattaataagtatggagaaggcaaatggcaccaagttcctgtaagagctgggctaaaccggtgcaggaaaagttgtagattaagatggttgaactatttgaagccaagtatcaagagaggaaaacttagctctgatgaagtcgatcttcttcttcgccttcataggcttctagggaataggtggtctttaattgctggaagattacctggtcggaccgcaaatgacgtcaagaattactggaacactcatctgagtaagaaacatgaaccgtgttgtaagataaagatgaaaaagagagacattacgcccattcctacaacaccggcactaaaaaacaatgtttataagcctcgacctcgatccttcacagttaacaacgactgcaaccatctcaatgccccaccaaaagttgacgttaatcctccatgccttggacttaacatcaataatgtttgtgacaatagtatcatatacaacaaagataagaagaaagaccaactagtgaataatttgattgatggagataatatgtggttagagaaattcctagaggaaagccaagaggtagatattttggttcctgaagcgacgacaacagaaaagggggacaccttggcttttgacgttgatcaactttggagtcttttcgatggagagactgtgaaatttgattag

SEQ ID NO: 874 - DNA, 789 bp, Prunus americana
  source 1..789: mol_type = other DNA
atggcggattccttaggagttcgtaaaggtgcatggacaggagaggaagatgatcttcttaggaaatgcattgagaaatatggggaagcaaaatggcatcaagttcctctaagagcaggattgcatcgatgccggaaaagctgtagactgcggtggctgaactatctcaacccgaatatcaaacgaggagaatttgcagcagatgaagttgatttaattttaaggctccataagctgctgggcaacagatggtcactgattgtgggcaggcttccgggaagaacagcgaacgatgtgaagaatttttggaacacgcacctgcgcaagaaagtggataaatgctgcaagaataataaagagatgaaagcaaaagctgagaaggtggaaaagatcaatatcataaaacctcaacctcggaccttcgctaaaaactcacaatggttgaagggcaagggaatgacttcaaataatttgcaattaggagattacaatctcggcaaacaatccaccccgtctgatcatcatcatcatcatcaacagcagcaggagaatgaaactgaatctgtatggtgggaaagttttttattcggagatgaattggatcaacaaggaatttcaagctcattgagtcggccagaagaggaatctactacggcaaatatttttgccgaaaagtctccagtagtgacaaaggtgacagaaaatagagtcattgaagcaggccagagttgtccgactgatgacttcgctttcgacgcggaactttgggatcttctcaatgcaaagtaa

SEQ ID NO: 875 - DNA, 753 bp, Vitis vinifera
  source 1..753: mol_type = other DNA
atggagagcttaggagttagaaagggtgcatggatccaagaagaggatgttctcctgaggaaatgcattgagaaatatggagaaggaaagtggcatctggttcccctccgagcagggttgaatagatgccgaaaaagctgcaggttgagatggctcaattatttgaagccggatatcaagagaggagagtttgcattagacgaggttgatctcatgattaggcttcacaatttgttggggaacagatggtccttgattgcgggtaggcttccagggaggactgctaatgatgtcaagaactattggcatagtcaccacttcaaaaaggaggttcagttccaggaagaagggagagataaaccccaaacacattctaaaaccaaagctataaagcctcaccctcacaagttctccaaagccttgccaaggtttgaactaaaaactacagctgtggatacttttgacacacaagtcagtacttccaggaagccatcatccacttcaccacaaccgaatgatgacatcatatggtgggaaagcctgttagctgagcatgctcaaatggatcaagaaactgacttttcggcttctggagagatgcttatcgcaagcctcaggacagaagaaactgcaacacagaaaaagggacccatggatggtatgattgaacaaatccagggaggtgagggtgattttccatttgatgtgggcttctgggatacacccaacacacaagtaaatcacttgatctga

SEQ ID NO: 876 - DNA, 732 bp, Prunus americana
  source 1..732: mol_type = other DNA
atggagggttataacttgggtgtgagaaaaggagcttggactagagaggaagatgatcttctgaggaagtgcattgagaaacaaggagaaggaaagtggcaccaagttccttacaaagcaggattaagcagatgcaggaagagctgtagactaaggtggttgaactatttgaagccaaatatcaagagaggagactttatggaagatgaagtagatctaataattaggcttcacaagcttttaggaaacaggtggtcattgattgctcgaagacttccgggaaggactgccaatgatgtgaaaaattactggaacacccgattgcggacggattattgcatgaaaaagatgaaagacaaatcccaagaaacaataaagaccataataaggccacaaccaagaagattcaccaaaagttcaaattgtttgagttttaaagaaccaattttggaccatactcaactagaagagaattttagtacgacatcacaaacatcaacatcaacaaggattggaagtgattggtgggagacctttttagatgacaaggatgctactgaaacagctacaggttctggtcttgggttagatgaagaactgctcgcaagtttttgggttgatgatgatatgccacaatcgacaagaacatgcgtcaatttttctgaggaaggattaagtagaggtgatttctcttttagcgtggacctttggaatcattcaaaagaagaatag

SEQ ID NO: 877 - DNA, 732 bp, Prunus americana
  source 1..732: mol_type = other DNA
atggagggttataacttgggtgtgagaaaaggagcttggactagagaggaagatgatcttctgaggcagtgcattgagaaacaaggagaaggaaagtggcaccaagttccttacaaagcaggattaagcagatgcaggaagagctgtagactaaggtggttgaactatttgaagccaaatatcaagagaggagaatttatggaagatgaagtagatctaataattaggcttcacaagcttttaggaaacaggtggtcattgattgctcgaagacttccgggaaggactgccaatgatgtgaaaaattactggaacacccgattgcggacggattattgcatgaaaaagatgaaagacaaatcccaagaaacaataaagaccataataaggccacaaccaagaagattcaccaaaagttcaaattgtttgagttttaaagaaccaattttggaccatactcaactagaagagaattttagtacgacatcacaaacatcaacatcaacaaggattggaagtgattggtgggagacctttttagatgacaaggatgctactgaaacagctacaggttctggtcttgggttagatgaagaactgctcgcaagtttttgggttgatgatgatatgccacaatcgacaagaacatgcgtcaatttttctgaggaaggattaagtagaggtgatttctcttttagcgtggacctttggaatcattcaaaagaagaatag

SEQ ID NO: 878 - DNA, 714 bp, Glycine max
  source 1..714: mol_type = other DNA
atggaaggatcatcaggtgtgaggaaaggcacatggagtcaaattgaagatgatcttctcaaagcttgcgtgcaactttatggggaaggaaattggcaccttgttcctaaaagagcagggttgaacagatgccgcaagagttgtagattgagatggttgaactatcttaaaccaaatatcaagcggggagatttcagtgaagatgaaattgatatgatgatcagattgcacaagcttttgggaaacagatggtccctgattgcaggaagacttccgggaagaacctcaaacgatgtaaaaaattattggaacacctacgcacgccgtaaattacactctcacaagaaagacaacaacatagaaaagcaagctagggccaaaacaaccgtgaaaccccacgaagttataaagcctgtacctcgagctttaacaaaaacatccccacggttgcaagggaaattcattaatagttcagaagttggtgttagtcatgaagaaggtgcaacttcaatatcagggtctgggaattggtgggaaacttttttagatgacaaggaagacattgaagaaggtaacaacaacaaatgcttctttggtggggaagatggagcacttgacctttggggtgaagagcttaattcaattgcttgtgactttcttacacaaggtgaaacttggagcgattttcttcttgacctagggctaggagattag

SEQ ID NO: 879 - DNA, 1962 bp, Glycine max
  source 1..1962: mol_type = other DNA
atgactgcgccactagacactggccttcaaagcatgttgcaggctgcggtgcaatctgttcactggacttacagcctcttctggcaactttgtccacagcaagtgattctggtttggggtgatggttactacaatggagcaattaagacacggaagacggtgcaaccaatggaggtgagtgctgaggaggcttctctccaaagaagtcagcaacttagagaactttatgaatcattgtccgtcggagagacaaatccgccgactcgccggccttgtgctgccttgtcgccggaggacttaacagaatctgaatggttctatttgatgtgtgtctcattctcctttcctcctggtgttgggttgcctggaaaggcatatgccaggaggcagcatctatggctcactggtgcaaacgaggtggacagcaaaacattttcacgagctattctagccaagagtgctcgtatacagaccgtggtgtgcattcctttattggatggcgtcgttgaatttgggacaacagataaggttcaagaagatcttagcttcatccaacacgtgaagacttttttcatagaccatctcatccctctcaggccaaagcctgccctatcggagcactcaacctccaaccctacctcctccgaccacatccccacagtcatgtacaccatggtggacccacctgccgccaagtgcaacctaaatgatgacatggatgaggatattgaagaggaagaggaggaggaagaagaggacgaggtggaatccggttccgaagatgaaactggagacggtattgcctgccaaactttgagaccatcaacggtggcagagcccagcgagctgatgcagctggagatgccagaggacattcgactcgggtcgccgaacgatggatcaaacaacctggactcagactttcatttgcttgcggtgagccagggtggcaatgaggcaaggcaggctgagtcaactcgaaggtggagctcaagtcaagaacccatgcaagttcaactaccgacttcagcccttcatccattagaagacttgacccaagaggacactcactactctcaaacggtgtccaacatcctccaaaaccagaccacacggtggctcgcctcaccctcctccattggctacaacacatactccacgcattcggcattcgcaaaatggagcagccgcgccagccaccacttccacccggcggcggacggcaccagccagtggctcctcaagtacatcctcttcacggtcccgcacctccacgccaagaaccccggcgagagttctccccataccgcggcggacaccaagctccgcggcaaggggacgccgcaggacgagctcagtgcgaaccacgtgctggccgagcgccgccgccgcgagaagctgaatgagaggttcataatcctgcggtcgctggtccccttcgtgaccaaaatggacaaggcgtcgatattgggagacaccatcgagtacgtgaagcagttgcggcggaagatccaggagctcgaggcgcgtaaccgcttaacggaggagcgttccaagctcccagaggtagcagttcagaggacgagtagcagttcgagcaaggagcaacagaggagtggggtgacgatgatggaaaagaggaaggtgaggatcgtggaaggggtagcggcgaaggcaaaggcagtggaagttgaggccaccacgtcggtgcaagtttcgatcatagagagcgacgcgctgttggagattgagtgtcgtcacagagaagggttacttctggacgtgatgcagatgctgagggaggtgaggatagaggttataggggtgcagtcttcgcttaacaatggggtgttcgtggcggagttgagggctaaggtgaaggagcatgcaaacgggaagaaggtcagcattgtggaagtgaagagggcacttaaccaaattataccccatgccgttgactaa

SEQ ID NO: 880 - protein, 248 aa, Arabidopsis thaliana
MEGSSKGLRKGAWTTEEDSLLRQCINKYGEGKWHQVPVRAGLNRCRKSCRLRWLNYLKPSIKRGKLSSDEVDLLLRLHRLLGNRWSLIAGRLPGRTANDVKNYWNTHLSKKHEPCCKIKMKKRDITPIPTTPALKNNVYKPRPRSFTVNNDCNHLNAPPKVDVNPPCLGLNINNVCDNSIIYNKDKKKDQLVNNLIDGDNMWLEKFLEESQEVDILVPEATTTEKGDTLAFDVDQLWSLFDGETVKFD

SEQ ID NO: 881 - protein, 262 aa, Prunus americana
MADSLGVRKGAWTGEEDDLLRKCIEKYGEAKWHQVPLRAGLHRCRKSCRLRWLNYLNPNIKRGEFAADEVDLILRLHKLLGNRWSLIVGRLPGRTANDVKNFWNTHLRKKVDKCCKNNKEMKAKAEKVEKINIIKPQPRTFAKNSQWLKGKGMTSNNLQLGDYNLGKQSTPSDHHHHHQQQQENETESVWWESFLFGDELDQQGISSSLSRPEEESTTANIFAEKSPVVTKVTENRVIEAGQSCPTDDFAFDAELWDLLNAK

SEQ ID NO: 882 - protein, 250 aa, Vitis vinifera
MESLGVRKGAWIQEEDVLLRKCIEKYGEGKWHLVPLRAGLNRCRKSCRLRWLNYLKPDIKRGEFALDEVDLMIRLHNLLGNRWSLIAGRLPGRTANDVKNYWHSHHFKKEVQFQEEGRDKPQTHSKTKAIKPHPHKFSKALPRFELKTTAVDTFDTQVSTSRKPSSTSPQPNDDIIWWESLLAEHAQMDQETDFSASGEMLIASLRTEETATQKKGPMDGMIEQIQGGEGDFPFDVGFWDTPNTQVNHLI

SEQ ID NO: 883 - protein, 243 aa, Prunus americana
MEGYNLGVRKGAWTREEDDLLRKCIEKQGEGKWHQVPYKAGLSRCRKSCRLRWLNYLKPNIKRGDFMEDEVDLIIRLHKLLGNRWSLIARRLPGRTANDVKNYWNTRLRTDYCMKKMKDKSQETIKTIIRPQPRRFTKSSNCLSFKEPILDHTQLEENFSTTSQTSTSTRIGSDWWETFLDDKDATETATGSGLGLDEELLASFWVDDDMPQSTRTCVNFSEEGLSRGDFSFSVDLWNHSKEE

SEQ ID NO: 884 - protein, 243 aa, Prunus americana
MEGYNLGVRKGAWTREEDDLLRQCIEKQGEGKWHQVPYKAGLSRCRKSCRLRWLNYLKPNIKRGEFMEDEVDLIIRLHKLLGNRWSLIARRLPGRTANDVKNYWNTRLRTDYCMKKMKDKSQETIKTIIRPQPRRFTKSSNCLSFKEPILDHTQLEENFSTTSQTSTSTRIGSDWWETFLDDKDATETATGSGLGLDEELLASFWVDDDMPQSTRTCVNFSEEGLSRGDFSFSVDLWNHSKEE

SEQ ID NO: 885 - protein, 237 aa, Glycine max
MEGSSGVRKGTWSQIEDDLLKACVQLYGEGNWHLVPKRAGLNRCRKSCRLRWLNYLKPNIKRGDFSEDEIDMMIRLHKLLGNRWSLIAGRLPGRTSNDVKNYWNTYARRKLHSHKKDNNIEKQARAKTTVKPHEVIKPVPRALTKTSPRLQGKFINSSEVGVSHEEGATSISGSGNWWETFLDDKEDIEEGNNNKCFFGGEDGALDLWGEELNSIACDFLTQGETWSDFLLDLGLGD

SEQ ID NO: 886 - protein, 653 aa, Glycine max
MTAPLDTGLQSMLQAAVQSVHWTYSLFWQLCPQQVILVWGDGYYNGAIKTRKTVQPMEVSAEEASLQRSQQLRELYESLSVGETNPPTRRPCAALSPEDLTESEWFYLMCVSFSFPPGVGLPGKAYARRQHLWLTGANEVDSKTFSRAILAKSARIQTVVCIPLLDGVVEFGTTDKVQEDLSFIQHVKTFFIDHLIPLRPKPALSEHSTSNPTSSDHIPTVMYTMVDPPAAKCNLNDDMDEDIEEEEEEEEEDEVESGSEDETGDGIACQTLRPSTVAEPSELMQLEMPEDIRLGSPNDGSNNLDSDFHLLAVSQGGNEARQAESTRRWSSSQEPMQVQLPTSALHPLEDLTQEDTHYSQTVSNILQNQTTRWLASPSSIGYNTYSTHSAFAKWSSRASHHFHPAADGTSQWLLKYILFTVPHLHAKNPGESSPHTAADTKLRGKGTPQDELSANHVLAERRRREKLNERFIILRSLVPFVTKMDKASILGDTIEYVKQLRRKIQELEARNRLTEERSKLPEVAVQRTSSSSSKEQQRSGVTMMEKRKVRIVEGVAAKAKAVEVEATTSVQVSIIESDALLEIECRHREGLLLDVMQMLREVRIEVIGVQSSLNNGVFVAELRAKVKEHANGKKVSIVEVKRALNQIIPHAVD

SEQ ID NO: 887 - DNA, 1170 bp, Glycine max
  source 1..1170: mol_type = other DNA
atggtttccgtggctgagattaggcaagctcaaagagctgaaggaccagctaccattctcgctatcggaactgctaacccaccaaacagagtggaccagtctacttaccccgactactacttccgcatcaccaactctgatcacatgaccgagctgaaagaaaagttccagcgcatgtgcgacaagtccatgatcaagacccgctacatgtacctcaacgaagagatcctcaaagaaaaccccaacatgtgcgcttacatggccccatctcttgatgctaggcaggatatggttgtggttgaggtgccaaagctcggaaaagaggctgctgttaaggccatcaaagagtggggacagcccaagtctaagatcacccaccttattttctgcaccacctccggtgttgatatgccaggtgctgattaccagcttaccaagcagcttggacttaggccctacgtgaagcgctacatgatgtaccaacaaggatgcttcgctggtggaaccgttcttaggcttgctaaggatctcgccgagaacaacaagggtgctagagttcttgttgtgtgctccgagattaccgctgttactttcaggggaccatctgacacccacctcgattctcttgttggacaggctcttttcggagatggtgctgctgctgtgattgtgggctctgatccaattccacaggttgagaagccactctacgagcttgtttggaccgctcaaaccattgctccagattccgagggtgctattgatggacatcttagagaggtgggccttaccttccaccttcttaaggatgtgccaggcatcgtgtccaagaacattgataaggccctcttcgaggccttcaatcccctcaacatctccgactacaactccatcttctggattgctcatccaggcggacctgctattcttgatcaggttgagcagaagctcggactcaagccagaaaagatgaaggctaccagggatgtgctctccgagtacggaaacatgtcatctgcttgcgtcctcttcatcctcgatgagatgagaagaaagtccgctgagaacggacataagactaccggtgaaggacttgagtggggagtgcttttcggattcggaccaggacttaccattgagactgtggtgcttcactccgtggctatctaa

SEQ ID NO: 888 - DNA, 1170 bp, Glycine max
  source 1..1170: mol_type = other DNA
atggtttcagtggcagaaatcagacaagcccagcgcgcagaaggtcccgcaaccatattggctatagggaccgctaacccacctaatcgtgtagaccagagtacatacccagattattattttagaattaccaacagcgatcacatgacagagctgaaggagaaattccaaaggatgtgtgacaagagtatgattaagactcgctatatgtatcttaacgaagaaattctcaaggaaaatcctaatatgtgcgcttatatggctccctctttggatgctcgccaagacatggtggtcgtcgaggtgccaaaacttggtaaagaggcagccgtaaaggccattaaagagtgggggcagcctaaaagcaaaattacacatcttatattctgcaccacttccggggttgacatgccaggggccgattatcagcttactaagcaactgggactgcgtccatacgtcaaacgctacatgatgtaccaacagggatgctttgcaggcggaaccgttctcaggctggccaaagatttggcagaaaataacaagggcgccagagtgctcgtagtttgttcagagattactgcagttacttttagaggcccatctgatactcatcttgatagcctcgtgggccaggctctgtttggtgatggagcagccgctgtaattgtcgggagcgatcccatcccccaagttgaaaaacccctctatgagttggtatggacagctcagacaatcgcaccagactctgagggagcaatcgacggccatttgagggaggttggtttgacttttcatttgctcaaggatgttcccggcatagtatccaaaaatattgataaggccctttttgaggctttcaacccccttaacatatctgactacaattctattttctggatagctcatccagggggaccagccatacttgatcaggttgagcaaaagttgggacttaagcccgagaaaatgaaagcaacacgcgatgtgctttccgagtatggcaatatgtcctccgcatgcgttcttttcattctggacgaaatgaggcgcaagagcgcagaaaatggccataaaacaaccggtgagggtctggaatggggggtgttgttcgggttcggtcctggcttgaccatagagaccgtggtgctccattctgtcgctatatga

SEQ ID NO: 889 - DNA, 1167 bp, Glycine max
  source 1..1167: mol_type = other DNA
atggtttccgtggctgagattaggcaagctcaaagagctgaaggaccagctaccattctcgctatcggaactgctaacccaccaaacagagtggaccagtctacttaccccgactactatttcagaatcactaactctgatcacatgaccgagctgaaagaaaagttccagcgcatgtgcgacaagtccatgatcaagacccgctacatgtacctcaacgaagagatcctcaaagaaaaccccaacatgtgcgcttacatggccccatctcttgatgctaggcaggatatggttgtggttgaggtgccaaagctcggaaaagaggctgctgttaaggccatcaaagagtggggacagcccaagtctaagatcacccaccttattttctgcaccacctccggtgttgatatgccaggagcagactatcagttgaccaagcagcttggacttaggccctacgtgaaacgctatatgatgtatcagcagggatgtttcgctggaggaaccgttcttaggcttgctaaagacctcgccgaaaataataaaggagctagagttcttgttgtgtgctccgagattaccgctgttactttcaggggaccatctgacacccacctcgattctcttgttggacaggctcttttcggagatggtgctgctgctgtgattgtgggctctgatccaattccacaggttgagaagccactctacgagcttgtttggaccgctcaaaccattgctccagattccgagggagcaatcgacggtcatcttagagaggtgggccttaccttccaccttcttaaggatgtgccaggcatcgtgtccaaaaatatcgacaaagccctcttcgaggccttcaatcccctcaacatctccgactacaactccatcttctggattgctcatccaggcggacctgctattcttgatcaggttgagcagaagctcggactcaagccagaaaagatgaaggctaccagggatgtgctctccgagtacggaaacatgtcatctgcttgcgtcctcttcatcctcgatgagatgagaagaaagtccgctgagaacggacataagactaccggtgaaggacttgagtggggagtgcttttcggattcggaccaggacttaccattgagactgtggtgcttcactccgtggctatc

SEQ ID NO: 890 - DNA, 1188 bp, Arabidopsis thaliana
  source 1..1188: mol_type = other DNA
atggttatggctggcgctagctcccttgatgagattagacaagctcagagagctgacggaccagctggaattcttgctatcggaactgctaaccccgagaaccatgttcttcaagctgagtaccccgactactacttccgcattaccaactctgagcacatgaccgacctcaaagaaaagttcaagcgcatgtgcgacaagtccaccattcgcaagaggcatatgcacctcaccgaagagttccttaaagaaaacccacacatgtgcgcctacatggctccatctcttgataccaggcaggatatcgttgtggttgaggtgccaaagctcggaaaagaggctgctgttaaggccatcaaagagtggggacagcccaagtccaagattacccatgttgttttctgcaccacctccggtgttgatatgccaggtgctgattaccagcttaccaagcttcttggactcaggccatctgtgaagcgccttatgatgtaccaacaaggatgcttcgctggtggaaccgtgcttaggattgctaaggatctcgctgagaacaacaggggtgctagagttcttgttgtgtgctccgagattaccgctgttactttcaggggaccatctgacacccaccttgattctcttgttggccaggctctcttctctgatggtgctgctgctcttatcgtgggctctgatccagatacttctgtgggagagaagcccatcttcgagatggtttctgctgctcagaccatccttccagattccgatggtgctattgatggccaccttagagaggtgggacttaccttccaccttctcaaggatgtgccaggcctcatctccaagaacatcgtgaagtctctcgacgaggctttcaagccactcggaatctctgattggaactccctcttctggattgctcatccaggtggaccagctattctcgaccaggttgagattaagctcggcctcaaagaggaaaagatgagggctaccaggcacgtgttgtctgagtacggaaacatgtcctctgcctgcgtgttgttcatcctcgacgagatgagaagaaagtccgctaaggatggtgttgctactaccggtgaaggacttgagtggggagttcttttcggattcggaccaggacttaccgttgagactgttgtgcttcactccgtgccactttga

SEQ ID NO: 891 - DNA, 1188 bp, Arabidopsis thaliana
  source 1..1188: mol_type = other DNA
atggttatggcaggggctagtagcctcgatgaaattcgtcaagctcaaagagccgacgggcctgctggtattctcgccataggaacagctaaccctgagaaccacgtgttgcaagccgaatatcctgattattattttcgtatcacaaacagtgagcatatgacagatctgaaagagaagtttaaaaggatgtgcgataaaagcacaatccgcaagcgccacatgcacctgactgaggaattcttgaaagagaatccacacatgtgtgcctacatggctcccagtttggatacccgccaagacatagttgtagtcgaggtccccaagctcggaaaagaggcagctgttaaggcaataaaggagtggggccagcccaagagtaagattacacacgtagttttctgtactacttccggagtcgacatgcctggcgcagactaccagctcacaaagctcctgggcctccgcccttccgtaaagagattgatgatgtaccaacagggttgtttcgctggcggaactgtgctcagaatagctaaggaccttgcagagaataatagaggcgccagggtactcgtcgtctgctcagaaattaccgctgtgacttttcgtggtccatccgacactcatctggactccctggtagggcaggctctcttctcagatggcgctgccgcactgatcgtcggatcagaccccgacacctcagtaggggaaaaaccaatctttgagatggtgtctgccgcccagacaattctccccgactcagacggagccatagacggacaccttcgtgaggtcggccttacatttcatcttctgaaggacgtccccggcctcatttctaaaaacatcgttaagtctctggacgaggcatttaagcctttgggtatttctgactggaacagtcttttctggatagcccatcctggcgggcccgctatcttggaccaagtcgaaatcaagctcggcctgaaggaggagaaaatgagggcaacccgccacgtcctctcagaatacggtaacatgagcagcgcctgcgtattgttcatattggatgagatgcgtagaaagtcagctaaagacggagttgccaccactggcgaggggctggaatggggggttctttttggcttcggaccaggactcactgtggagactgttgttctgcactccgttcctttgtga

SEQ ID NO: 892 - DNA, 1188 bp, Arabidopsis thaliana
  source 1..1188: mol_type = other DNA
atggttatggctggcgctagctcccttgatgagattagacaagctcagagagctgacggaccagctggaattcttgctatcggaactgctaaccccgagaaccatgttcttcaagctgagtaccccgactactactttcgtattactaattctgaacatatgacagacttgaaggagaagtttaaaagaatgtgcgataaatccaccattcgcaagaggcatatgcacctcaccgaagagttccttaaagaaaacccacacatgtgcgcctacatggctccatctcttgataccaggcaggatatcgttgtggttgaggtgccaaagctcggaaaagaggctgctgttaaggccattaaagagtggggacagcctaaaagcaaaatcactcatgttgttttctgcaccacctccggtgttgatatgccaggtgcagattatcagcttaccaagcttcttggactcaggccatctgtgaagcgccttatgatgtatcagcagggatgtttcgctggtggaaccgtgcttaggattgctaaggatctcgccgaaaataacaggggagctagagttcttgttgtgtgctccgagattaccgctgttactttcaggggaccatctgacacccaccttgattctcttgttggccaggctctcttctctgatggtgctgctgctcttatcgtgggctctgatccagatacttctgtgggagagaagcccatcttcgagatggtttctgctgctcagaccatccttccagattccgatggtgctatcgacggacatcttagagaggtgggacttaccttccaccttctcaaggatgtgccaggcctcatctccaagaacatcgtgaagtctctcgacgaggctttcaagccactcggaatctctgattggaactccctcttctggattgctcatccaggtggaccagctattctcgaccaggttgagattaagctcggcctcaaagaggaaaagatgagggctaccaggcacgtgttgtctgagtacggaaacatgtcctctgcctgcgtgttgttcatcctcgacgagatgagaagaaagtccgctaaggatggtgttgctactaccggtgaaggacttgagtggggagttcttttcggatttggaccaggtcttactgtggagacagtggtccttcactccgtgccactttga

SEQ ID NO: 893 - DNA, 1218 bp, Equisetum arvense
  source 1..1218: mol_type = other DNA
atgaccgtgcttgaagagtccgctgatgcttcctctagaaggcttgctcaaagagctaacggaccagctaccgtgttggctattggaactgctaaccctgctaacgtgttcgagcagtcaagctacccagacttctacttcgacatcaccaacagccagcacatgaccgagttgaagctcaagttctctcgcatgtgccagaagtccggcatcaagaaacgctacatgcacctcaactccgagatcctcaaggctaacccatctctttgcgcttactgggagaagtcccttgatgtgaggcaggatattgctgtggtggaagtgccaaagctcggcaaagaggcttcccttaaggctatcaaagagtggggacagcccaagtccaagattacccatcttgttttctgcaccacctccggtgttgatatgccaggtgctgattgggctcttaccaagcttcttggtcttaggccatccgtgaagcgccttatgatgtaccaacaaggatgcttcgctggtggaaccgttcttagagttgctaaggatgtggccgagaacaacaagggtgctagagttcttgttgtgtgcagcgagattacctgcgttaccttcagaggaccatccgagactcaccttgattcccttgttggacaggctctcttcggagatggtgctgctgctgttattctcggctctgatccacttccagaagagaacccttgcttcgagttgcactggtccggatccaacattctcccagattccgatggcgctattgatggacatcttagagaggtgggactgaccttccacctcatgaaggatgtgccaggcatcatctccaagaacatcggaaaggtgctcaacgacgctttcaggtctgctttcgatgagtctggaaacgctgaggataggccagcttccgtgaacgatattttctggattgctcacccaggcggcccagctattttggatcaagttgaagagaagatgaagctcgcccctgaaaagatgagggctaccagggatgttctctccgagtacggaaacatgtcctctgcttgcgtcctcttcatcatggaccacatgagaaggatgagcgcccagaacaagcttcaaactactggtgagggactcgattggggagtgcttcttggattcggacctggacttaccgttgagactgtgctcctcaagtccattaggcttgcttgctga

SEQ ID NO: 894 - DNA, 1218 bp, Equisetum arvense
  source 1..1218: mol_type = other DNA
atgaccgtgcttgaagagtccgctgatgcttcctctagaaggcttgctcaaagagctaacggaccagctaccgtgttggctattggaactgctaaccctgctaacgtgttcgagcagtcaagctacccagacttctacttcgacatcaccaacagccagcacatgaccgagttgaagctcaagttctctcgcatgtgccagaagtccggcatcaagaaacgctacatgcacctcaactccgagatcctcaaggctaacccatctctttgcgcttactgggagaagtcccttgatgtgaggcaggatattgctgtggtggaagtgccaaagctcggcaaagaggcttcccttaaggctattaaagagtggggacagcccaaatctaagatcactcatcttgttttctgcaccacctccggtgttgatatgccaggtgctgattgggctcttaccaagcttcttggtcttaggccatccgtgaagcgccttatgatgtatcagcagggatgcttcgctggtggaaccgttcttagagttgctaaagatgtggccgaaaacaataaaggagctagagttcttgttgtgtgcagcgagattacctgcgttaccttcagaggaccatccgagactcaccttgattcccttgttggacaggctctcttcggagatggtgctgctgctgttattctcggctctgatccacttccagaagagaacccttgcttcgagttgcactggtccggatccaacattctcccagattccgatggcgctattgatggacatcttagagaggtgggactgaccttccacctcatgaaggatgtgccaggcatcatctccaagaacatcggaaaggtgctcaacgacgctttcaggtctgctttcgatgagtctggaaacgctgaggataggccagcttccgtgaacgatattttctggattgctcacccaggcggcccagctattttggatcaagttgaagagaagatgaagctcgcccctgaaaagatgagggctaccagggatgttctctccgagtacggaaacatgtcctctgcttgcgtcctcttcatcatggaccacatgagaaggatgagcgcccagaacaagcttcaaactactggtgagggactcgattggggagtgcttcttggattcggacctggacttaccgttgagactgtgctcctcaagtccattaggcttgcttgctga

SEQ ID NO: 895 - DNA, 1218 bp, Equisetum arvense
  source 1..1218: mol_type = other DNA
atgaccgttcttgaagaaagcgcagatgcttcatcacgtcgcctcgcccaaagagcaaacggtcctgccaccgtcctcgccatcggaaccgccaaccccgcaaacgtttttgagcaatcctcctatccagatttttacttcgacatcacaaattcacagcacatgaccgaacttaaattgaagttttcaaggatgtgccagaagagcggcatcaagaaacgctatatgcatctcaacagcgagatacttaaagccaatcccagcctgtgtgcctattgggagaagtctctggatgtacgtcaagacatagccgttgtcgaagtacccaagttgggtaaagaggcctcacttaaagcaattaaagaatggggacaacctaaatctaaaatcactcatctggttttctgcaccacttccggagttgacatgccaggggcagattgggctctgaccaagctccttggcttgcgtccttcagtcaagagacttatgatgtatcagcagggatgctttgccggaggtacagttctccgtgtagctaaagacgttgccgaaaacaacaaaggtgctagggtccttgtagtatgcagtgagatcacctgcgtaacttttaggggaccttctgaaacacacctggattcactcgtgggacaagcactttttggggatggagcagccgccgtgatcctgggttctgatcctcttcctgaggagaatccttgcttcgaactgcattggtcaggctctaacatattgcctgattcagatggcgctatagacggtcacctccgtgaagtaggccttactttccaccttatgaaggatgtaccaggaataatttcaaagaatataggaaaggttcttaacgacgcattcagaagtgcctttgacgagagcggtaacgctgaggacagaccagcaagtgtaaatgacatcttttggatcgctcaccccggcggacccgcaatccttgatcaagttgaagagaagatgaaattggcaccagaaaaaatgcgcgcaacaagggatgtgttgagcgaatatggtaacatgtcttcagcctgcgttctgtttatcatggaccacatgcgtaggatgtctgcccaaaataaattgcagactacaggtgaagggctggattggggcgtccttctggggtttggccccggtttgactgtagagaccgtattgctgaagtctataagacttgcttgctga

SEQ ID NO: 896 - protein, 389 aa, Glycine max
MVSVAEIRQAQRAEGPATILAIGTANPPNRVDQSTYPDYYFRITNSDHMTELKEKFQRMCDKSMIKTRYMYLNEEILKENPNMCAYMAPSLDARQDMVVVEVPKLGKEAAVKAIKEWGQPKSKITHLIFCTTSGVDMPGADYQLTKQLGLRPYVKRYMMYQQGCFAGGTVLRLAKDLAENNKGARVLVVCSEITAVTFRGPSDTHLDSLVGQALFGDGAAAVIVGSDPIPQVEKPLYELVWTAQTIAPDSEGAIDGHLREVGLTFHLLKDVPGIVSKNIDKALFEAFNPLNISDYNSIFWIAHPGGPAILDQVEQKLGLKPEKMKATRDVLSEYGNMSSACVLFILDEMRRKSAENGHKTTGEGLEWGVLFGFGPGLTIETVVLHSVAI

SEQ ID NO: 897 - protein, 389 aa, Glycine max; identical to SEQ ID NO: 896

SEQ ID NO: 898 - protein, 389 aa, Glycine max; identical to SEQ ID NO: 896

SEQ ID NO: 899 - protein, 395 aa, Arabidopsis thaliana
MVMAGASSLDEIRQAQRADGPAGILAIGTANPENHVLQAEYPDYYFRITNSEHMTDLKEKFKRMCDKSTIRKRHMHLTEEFLKENPHMCAYMAPSLDTRQDIVVVEVPKLGKEAAVKAIKEWGQPKSKITHVVFCTTSGVDMPGADYQLTKLLGLRPSVKRLMMYQQGCFAGGTVLRIAKDLAENNRGARVLVVCSEITAVTFRGPSDTHLDSLVGQALFSDGAAALIVGSDPDTSVGEKPIFEMVSAAQTILPDSDGAIDGHLREVGLTFHLLKDVPGLISKNIVKSLDEAFKPLGISDWNSLFWIAHPGGPAILDQVEIKLGLKEEKMRATRHVLSEYGNMSSACVLFILDEMRRKSAKDGVATTGEGLEWGVLFGFGPGLTVETVVLHSVPL

SEQ ID NO: 900 - protein, 395 aa, Arabidopsis thaliana; identical to SEQ ID NO: 899

SEQ ID NO: 901 - protein, 395 aa, Arabidopsis thaliana; identical to SEQ ID NO: 899

SEQ ID NO: 902 - protein, 405 aa, Equisetum arvense
MTVLEESADASSRRLAQRANGPATVLAIGTANPANVFEQSSYPDFYFDITNSQHMTELKLKFSRMCQKSGIKKRYMHLNSEILKANPSLCAYWEKSLDVRQDIAVVEVPKLGKEASLKAIKEWGQPKSKITHLVFCTTSGVDMPGADWALTKLLGLRPSVKRLMMYQQGCFAGGTVLRVAKDVAENNKGARVLVVCSEITCVTFRGPSETHLDSLVGQALFGDGAAAVILGSDPLPEENPCFELHWSGSNILPDSDGAIDGHLREVGLTFHLMKDVPGIISKNIGKVLNDAFRSAFDESGNAEDRPASVNDIFWIAHPGGPAILDQVEEKMKLAPEKMRATRDVLSEYGNMSSACVLFIMDHMRRMSAQNKLQTTGEGLDWGVLLGFGPGLTVETVLLKSIRLAC

SEQ ID NO: 903 - protein, 405 aa, Equisetum arvense; identical to SEQ ID NO: 902

SEQ ID NO: 904 - protein, 405 aa, Equisetum arvense; identical to SEQ ID NO: 902

SEQ ID NO: 905 - DNA, 3358 bp, synthetic construct
  misc_feature 1..3358: note = ARDV-02 selection marker
  source 1..3358: mol_type = other DNA
ggccaaagcacatagttatcgatttaaatttcatcgaagagattaatatcgaataatcatatacatactttaaatacataacaaattttaaatacatatatctggtatataattaattttttaaagtcatgaagtatgtatcaaatacaaatatggaaaaaattaactattcataatttaaaaaatagaaaagatacatctagtgaaattaggtgcatgtatcaaatacattaggaaaagggcatatatcttgatctagataattaacgattttgatttatgtataatttccaaatgaaggtttatatctacttcagaaataacaatatacttttatcagaacattcaacaaagcaacaaccaactagagtgaaaaatacacattgttctctagacatacaaaattgagaaaagaatctcaaaatttagagaaacaaatctgaatttctagaagaaaaaaataattatgcactttgctattgctcgaaaaataaatgaaagaaattagacttttttaaaagatgttagactagatatactcaaaagctattaaaggagtaatattcttcttacattaagtattttagttacagtcctgtaattaaagacacattttagattgtatctaaacttaaatgtatctagaatacatatatttgattgcatcatatccatgtatccgacacaccaattctcataaaaaacgtaatatcctaaactaatttatccttcaagtcaacctaagcccaatatacattttcatctctaaaggcccaagtggcacaaaatgtcaggcccaattacgaagaaaagggcttgtaaaaccctaataaagtggcactggcagagcttacactctcattccatcaacaaagaaaccctaaaagccgcagcgccactgatttctctcctccaggcgaagtgatcaatggcggcggcaacaacaacaacaacaacatcttcttcgatctccttctccaccaaaccatctccttcctcctccaaatcaccattaccaatctccagattctccctcccattctccctaaaccccaacaaatcatcctcctcctcccgccgccgcggtatcaaatccagctctccctcctccatctccgccgtgctcaacacaaccaccaatgtcacaaccactccctctccaaccaaacctaccaaacccgaaacattcatctcccgattcgctccagatcaaccccgcaaaggcgctgatatcctcgtcgaagctttagaacgtcaaggcgtagaaaccgtattcgcttaccctggaggtgcatcaatggagattcaccaagccttaacccgctcttcctcaatccgtaacgtccttcctcgtcacgaacaaggaggtgtattcgcagcagaaggatacgctcgatcctcaggtaaaccaggtatctgtatagccacttcaggtcccggagctacaaatctcgttagcggattagccgatgcgttgttagatagtgttcctcttgtagcaatcacaggacaagtccctcgtcgtatgattggtacagatgcgtttcaagagactccgattgttgaggtaacgcgttcgattacgaagcataactatcttgtgatggatgttgaagatatccctaggattattgaggaagctttctttttagctacttctggtagacctggacctgttttggttgatgttcctaaagatattcaacaacagcttgcgattcctaattgggaacaggctatgagattacctggttatatgtctaggatgcctaaacctccggaagattctcatttggagcagattgttaggttgatttctgagtctaagaagcctgtgttgtatgttggtggtggttgtttgaattctagcgatgaattgggtaggtttgttgagcttacggggatccctgttgcgagtacgttgatggggctgggatcttatccttgtgatgatgagttgtcgttacatatgcttggaatgcatgggactgtgtatgcaaattacgctgtggagcatagtgatttgttgttggcgtttggggtaaggtttgatgatcgtgtcacgggtaagcttgaggcttttgctagtagggctaagattgttcatattgatattgactcggctgagattgggaagaataagactcctcatgtgtctgtgtgtggtgatgttaagctggctttgcaagggatgaataaggttcttgagaaccgagcggaggagcttaagcttgattttggagtttggaggaatgagttgaacgtacagaaacagaagtttccgttgagctttaagacgtttggggaagctattcctccacagtatgcgattaaggtccttgatgagttgactgatggaaaagccataataagtactggtgtcgggcaacatcaaatgtgggcggcgcagttctacaattacaagaaaccaaggcagtggctatcatcaggaggccttggagctatgggatttggacttcctgctgcgattggagcgtctgttgctaaccctgatgcgatagttgtggatattgacggagatggaagctttataatgaatgtgcaagagctagccactattcgtgtagagaatcttccagtgaaggtacttttattaaacaaccagcatcttggcatggttatgcaatgggaagatcggttctacaaagctaaccgagctcacacatttctcggggatccggctcaggaggacgagatattcccgaacatgttgctgtttgcagcagcttgcgggattccagcggcgagggtgacaaagaaagcagatctccgagaagctattcagacaatgctggatacaccaggaccttacctgttggatgtgatttgtccgcaccaagaacatgtgttgccgatgatcccgaatggtggcactttcaacgatgtcataacggaaggagatggccggattaaatactgatcactgattttaatgtttagcaaatgtcttatcagttttctctttttgtcgaacggtaatttagagttttttttgctatatggattttcgtttttgatgtatgtgacaaccctcgggattgttgatttatttcaaaactaagagtttttgtcttattgttctcgtctattttggaatatcaatcttagttttatatcttttctagttctctacgtgttaaatgttcaacacactagcaatttggcctgccagcgtatggattatggaactatcaagtgtgtgggatcgataaatatgcttctcaggaatttgagattttacagtctttatgctcattgggttgagtataatatagtaaaaaaatagtaaatttaagcaataatgttaggtgctatgtgtctgtcgagactattggcc

SEQ ID NO: 906 - DNA, 4534 bp, synthetic construct
  misc_feature 1..4534: note = ARDV-02 GOI
  source 1..4534: mol_type = other DNA
aacacaagcttcaagttttaaaaggaaaaatgtcagccaaaaactttaaataaaatggtaacaaggaaattattcaaaaattacaaacctcgtcaaaataggaaagaaaaaaagtttagggatttagaaaaaacatcaatctagttccaccttattttatagagagaagaaactaatatataagaactaaaaaacagaagaatagaaaaaaaaagtattgacaggaaagaaaaagtagctgtatgcttataagtactttgaggatttgaattctctcttataaaacacaaacacaatttttagattttatttaaataatcatcaatccgattataattatttatatatttttctattttcaaagaagtaaatcatgagcttttccaactcaacatctattttttttctctcaacctttttcacatcttaagtagtctcaccctttatatatataacttatttcttaccttttacattatgtaacttttatcaccaaaaccaacaactttaaaattttattaaatagactccacaagtaacttgacactcttacattcatcgacattaacttttatctgttttataaatattattgtgatataatttaatcaaaataaccacaaactttcataaaaggttcttattaagcatggcatttaataagcaaaaacaactcaatcactttcatataggaggtagcctaagtacgtactcaaaatgccaacaaataaaaaaaaagttgctttaataatgccaaaacaaattaataaaacacttacaacaccggattttttttaattaaaatgtgccatttaggataaatagttaatatttttaataattatttaaaaagccgtatctactaaaatgatttttatttggttgaaaatattaatatgtttaaatcaacacaatctatcaaaattaaactaaaaaaaaataagtgtacgtggttaacattagtacagtaatataagaggaaaatgagaaattaagaaattgaaagcgagtctaatttttaaattatgaacctgcatatataaaaggaaagaaagaatccaggaagaaaagaaatgaaaccatgcatggtcccctcgtcatcacgagtttctgccatttgcaatagaaacactgaaacacctttctctttgtcacttaattgagatgccgaagccacctcacaccatgaacttcatgaggtgtagcacccaaggcttccatagccatgcatactgaagaatgtctcaagctcagcaccctacttctgtgacgtgtccctcattcaccttcctctcttccctataaataaccacgcctcaggttctccgcttcacaactcaaacattctctccattggtccttaaacactcatcagtcatcaccatggccaagctagttttttccctttgttttctgcttttcagtggctgctgcttcgctagggagctcgaggagttgaacgtgcctggcgagattgtagagtcattgagctctagtgaggagagtataacaaggatcaataaaaagattgaaaaatttcaaagcgaagagcagcaacaaacagaagatgaactgcaagacaaaattcatccttttgctcagacacagagcttggtgtatcccttcccagggccaattcccaatagtctgccccaaaacatccctcccttgacccaaacccccgtagtagtacctccattcttgcagcctgaagtgatgggggtgagtaaagtgaaggaggcaatggcccctaagcataaagagatgccattccctaaatatcccgttgagccattcaccgaatcacaatccttgacacttactgatgtcgagaatttgcacttgccactgcccttgctccaaagctggatgcaccaaccacaccaacctctgcctcccacagtgatgttcccaccccaatccgtcttgtctctgtcccagtcaaaggtgttgcctgttcctcagaaagcagttccctatccccaacgcgatatgcccatccaggcttttctcttgtatcaagaaccagtgctcggtcctgtcagaggccccttccccattatcgtgttcatgagaccaaagcacccaatcaagcaccagggacttccacaagaggtgctcaacgagaacctcctcagattcttcgtggctccatttccagaggtgttcggcaaagagaaggtcaacgagctgtccaaggatatcggatctgagtctactgaggaccaggccatggaagatatcaagcagatggaagccgagtccatctccagctctgaagagattgtgcccaactccgttgagcagaagcacatccagaaagaggacgttccctccgagagataccttggttaccttgagcagcttctccgcctcaagaagtacaaggttccacagcttgagatcgtcccaaactccgctgaagaaaggctccactctatgaaggaaggcatccacgctcagcagaaagaacctatgatcggagtgaatcaagagctggcctacttctacccagagctgttcagacagttctaccagctcgatgcttacccatctggtgcatggtactacgttccacttggaacccagtacaccgacgctccatccttctccgatattccaaatccaatcggctccgagaactccgaaaagaccactatgccactttggttcatgcgcccaaaacatcccataaaacatcaaggattgccccaggaagtactcaacgagaatctcctccgttttttcgttgctcctttccccgaagtgttcgggaaggaaaaagtaaacgagctttcaaaggacatcggctctgaaagtaccgaggatcaggctatggaagatatcaagcaaatggaggccgaatctataagttcttcagaagaaatagttcccaactcagtggagcagaagcacattcagaaagaagacgtgcccagcgagcgctatctgggatatttggaacagctgctcagactgaaaaagtacaaggtgcctcagctcgaaatcgtacccaatagtgctgaagaaaggttgcactcaatgaaagaggggattcacgcacaacaaaaagagcctatgatcggagtaaatcaagaactggcatacttttatcccgagttgtttcgccaattctatcaactggatgcctacccttccggtgcatggtactacgtacccctcggtactcaatataccgatgctccctccttttccgacattcctaatcctataggttccgagaatagcgaaaagaccaccatgcccttatggttcatgcgcgaactggaagagttgaacgtaccaggagagattgtagaatcactgagctcctcagaggagtctattactcgtatcaacaagaagatagagaagttccaatccgaggagcaacaacaaacagaggacgaattgcaggacaagatacatcctttcgcacagacccagagcctcgtctatccctttccaggtccaatccctaactctctcccccagaatatcccacccttgactcagactcccgtggtcgtaccccctttcttgcaacccgaggtgatgggggtttctaaagtcaaagaggctatggctcctaaacataaggaaatgccttttcccaaatatccagtggagccattcactgagagccagtctctgacacttacagatgtggaaaacttgcacctgcccttgccacttttgcagtcctggatgcaccaaccacatcaacccttgccccccacagtgatgtttcctccacaatcagttcttagtctctcccaaagcaaagtccttccagtgcctcagaaggccgtcccatacccccagagagatatgccaatacaggcattcttgctttaccaggaaccagtgctcggtcctgtacgtggcccattccctatcatagtgtaaatatgaagatgaagatgaaatatttggtgtgtcaaataaaaagcttgtgtgcttaagtttgtgtttttttcttggcttgttgtgttatgaatttgtggctttttctaatatcaaatgaatgtaagatctcattataatgaataaacaaatgtttctataatccattgtgaatgttttgttggatctcttctgcagcatataactactgtatgtgctatggtatggactatggaatatgattaaagataaatctcgtctctgttatgcttaagaagttcaatgtttcgtttcatgtaaaactttggtggtttgtgttttggggccttgtataatccctgatgaataagtgttctactatgtttccgttcctgttatctctttctttctaatgacaagtcgaacttcttctttatcatcgcttcgtttttattatctgtgcttcttttgtttaatacgcctgcaaagtgactcgactctgtttagtgcagttctgcgaaacttgtaaatagtccaattgttggcctctagtaatagatgtagcgaaagtgttgagctgttgggttctaaggatggcttgaacatgttaatcttttaggttctgagtatgatgaacattcgttgttgc

SEQ ID NO: 907 - DNA, 3358 bp, synthetic construct; identical to SEQ ID NO: 905
  misc_feature 1..3358: note = ARDV-11 selection marker
  source 1..3358: mol_type = other DNA

SEQ ID NO: 908 - DNA, 4316 bp, synthetic construct
  misc_feature 1..4316: note = ARDV-11 GOI
  source 1..4316: mol_type = other DNA
aacacaagcttcaagttttaaaaggaaaaatgtcagccaaaaactttaaataaaatggtaacaaggaaattattcaaaaattacaaacctcgtcaaaataggaaagaaaaaaagtttagggatttagaaaaaacatcaatctagttccaccttattttatagagagaagaaactaatatataagaactaaaaaacagaagaatagaaaaaaaaagtattgacaggaaagaaaaagtagctgtatgcttataagtactttgaggatttgaattctctcttataaaacacaaacacaatttttagattttatttaaataatcatcaatccgattataattatttatatatttttctattttcaaagaagtaaatcatgagcttttccaactcaacatctattttttttctctcaacctttttcacatcttaagtagtctcaccctttatatatataacttatttcttaccttttacattatgtaacttttatcaccaaaaccaacaactttaaaattttattaaatagactccacaagtaacttgacactcttacattcatcgacattaacttttatctgttttataaatattattgtgatataatttaatcaaaataaccacaaactttcataaaaggttcttattaagcatggcatttaataagcaaaaacaactcaatcactttcatataggaggtagcctaagtacgtactcaaaatgccaacaaataaaaaaaaagttgctttaataatgccaaaacaaattaataaaacacttacaacaccggattttttttaattaaaatgtgccatttaggataaatagttaatatttttaataattatttaaaaagccgtatctactaaaatgatttttatttggttgaaaatattaatatgtttaaatcaacacaatctatcaaaattaaactaaaaaaaaaataagtgtacgtggttaacattagtacagtaatataagaggaaaatgagaaattaagaaattgaaagcgagtctaatttttaaattatgaacctgcatatataaaaggaaagaaagaatccaggaagaaaagaaatgaaaccatgcatggtcccctcgtcatcacgagtttctgccatttgcaatagaaacactgaaacacctttctctttgtcacttaattgagatgccgaagccacctcacaccatgaacttcatgaggtgtagcacccaaggcttccatagccatgcatactgaagaatgtctcaagctcagcaccctacttctgtgacgtgtccctcattcaccttcctctcttccctataaataaccacgcctcaggttctccgcttcacaactcaaacattctctccattggtccttaaacactcatcagtcatcaccatggccaagctagttttttccctttgttttctgcttttcagtggctgctgcttcgctagggaactcgaggaacttaacgttccaggtgagatcgtcgagtccctctcatcttccgaagagtccattaccaggatcaacaagaagatcgagaagttccagtccgaggaacaacagcaaaccgaggatgagcttcaggacaagattcacccattcgctcagacccagtctctcgtgtatccatttccagggccaattccaaacagcctgccacagaacattccaccacttactcagaccccagttgtggtgccaccattccttcaaccagaggttatgggagtgtccaaggtgaaagaagccatggcaccaaagcacaaagagatgccctttccaaagtaccccgttgagccattcactgagtctcagtctcttaccctcaccgacgttgagaaccttcaccttccacttccattgctccagtcttggatgcatcaaccacatcagccacttccaccaaccgttatgttcccacctcagtccgtgcttagcctctctcagtctaaggttttgccagtgcctcagaaggccgttccatatccacaaagggatatgccaatccaggccttcttgctctaccaagagccagttcttggaccagtgagaggcccatttccaatcattgtgcgcgaactggaagagttgaacgtaccaggagagattgtagaatcactgagctcctcagaggagtctattactcgtatcaacaagaagatagagaagttccaatccgaggagcaacaacaaacagaggacgaattgcaggacaagatacatcctttcgcacagacccagagcctcgtctatccctttccaggtccaatccctaactctctcccccagaatatcccacccttgactcagactcccgtggtcgtaccccctttcttgcaacccgaggtgatgggggtttctaaagtcaaagaggctatggctcctaaacataaggaaatgccttttcccaaatatccagtggagccattcactgagagccagtctctgacacttacagatgtggaaaacttgcacctgcccttgccacttttgcagtcctggatgcaccaaccacatcaacccttgccccccacagtgatgtttcctccacaatcagttcttagtctctcccaaagcaaagtccttccagtgcctcagaaggccgtcccatacccccagagagatatgccaatacaggcattcttgctttaccaggaaccagtgctcggtcctgtacgtggcccattccctatcatagtgcaagagcagaatcaagagcagccaatccgttgtgagaaggacgagaggttcttctcagacaagatcgccaaatatatacccatacaatatgtactctcacgctaccctagctacgggcttaactactatcagcaaaaacctgtagcactgataaataaccagtttctcccctatccctattatgctaaacctgccgccgtgaggagtccagcacaaatacttcagtggcaagtgctcagtaacaccgtgccagcaaaaagctgccaggctcagcccaccacaatggcccgtcatccccatcctcaccttagcttcatggcaatcccaccaaagaagaatcaagacaagaccgaaatacctaccatcaacacaattgcatctggagagcctaccagtacaccaacaactgaggcagtagagtctactgttgctacccttgaggacagccccgaggttatagagtccccacctgagataaataccgtgcaggtgacaagtaccgccgtattgatcgtaacacagactatgaagggtcttgatatacagaaggtggccgggacttggtacagtttggcaatggccgcatccgacatctccttgttggacgcacaatcagccccattgcgtgtgtacgtagaagagcttaaaccaactcccgagggggatctggaaattctgctccagaaatgggagaacggtgagtgcgcccagaagaagatcatcgcagagaagaccaaaattccagcagtattcaaaatcgacgcattgaacgaaaataaggtgctcgtactggacactgattataagaagtatctccttttctgtatggagaactcagcagagcctgaacagagtcttgcctgccaatgccttgttcgtaccccagaggtagatgatgaagctctggaaaagttcgataaggcccttaaggctctgcctatgcacattaggctttctttcaatccaactcaacttgaggaacaatgtcacatttaaatatgaagatgaagatgaaatatttggtgtgtcaaataaaaagcttgtgtgcttaagtttgtgtttttttcttggcttgttgtgttatgaatttgtggctttttctaatatcaaatgaatgtaagatctcattataatgaataaacaaatgtttctataatccattgtgaatgttttgttggatctcttctgcagcatataactactgtatgtgctatggtatggactatggaatatgattaaagataaatctcgtctctgttatgcttaagaagttcaatgtttcgtttcatgtaaaactttggtggtttgtgttttggggccttgtataatccctgatgaataagtgttctactatgtttccgttcctgttatctctttctttctaatgacaagtcgaacttcttctttatcatcgcttcgtttttattatctgtgcttcttttgtttaatacgcctgcaaagtgactcgactctgtttagtgcagttctgcgaaacttgtaaatagtccaattgttggcctctagtaatagatgtagcgaaagtgttgagctgttgggttctaaggatggcttgaacatgttaatcttttaggttctgagtatgatgaacattcgttgttgc

SEQ ID NO: 909 - DNA, 3358 bp, synthetic construct; identical to SEQ ID NO: 905
  misc_feature 1..3358: note = ARDV-12 selection marker
  source 1..3358: mol_type = other DNA

SEQ ID NO: 910 - DNA, 4576 bp, synthetic construct
  misc_feature 1..4576: note = ARDV-12 GOI
  source 1..4576: mol_type = other DNA
aacacaagcttcaagttttaaaaggaaaaatgtcagccaaaaactttaaataaaatggtaacaaggaaattattcaaaaattacaaacctcgtcaaaataggaaagaaaaaaagtttagggatttagaaaaaacatcaatctagttccaccttattttatagagagaagaaactaatatataagaactaaaaaacagaagaatagaaaaaaaaagtattgacaggaaagaaaaagtagctgtatgcttataagtactttgaggatttgaattctctcttataaaacacaaacacaatttttagattttatttaaataatcatcaatccgattataattatttatatatttttctattttcaaagaagtaaatcatgagcttttccaactcaacatctattttttttctctcaacctttttcacatcttaagtagtctcaccctttatatatataacttatttcttaccttttacattatgtaacttttatcaccaaaaccaacaactttaaaattttattaaatagactccacaagtaacttgacactcttacattcatcgacattaacttttatctgttttataaatattattgtgatataatttaatcaaaataaccacaaactttcataaaaggttcttattaagcatggcatttaataagcaaaaacaactcaatcactttcatataggaggtagcctaagtacgtactcaaaatgccaacaaataaaaaaaaagttgctttaataatgccaaaacaaattaataaaacacttacaacaccggattttttttaattaaaatgtgccatttaggataaatagttaatatttttaataattatttaaaaagccgtatctactaaaatgatttttatttggttgaaaatattaatatgtttaaatcaacacaatctatcaaaattaaactaaaaaaaaataagtgtacgtggttaacattagtacagtaatataagaggaaaatgagaaattaagaaattgaaagcgagtctaatttttaaattatgaacctgcatatataaaaggaaagaaagaatccaggaagaaaagaaatgaaaccatgcatggtcccctcgtcatcacgagtttctgccatttgcaatagaaacactgaaacacctttctctttgtcacttaattgagatgccgaagccacctcacaccatgaacttcatgaggtgtagcacccaaggcttccatagccatgcatactgaagaatgtctcaagctcagcaccctacttctgtgacgtgtccctcattcaccttcctctcttccctataaataaccacgcctcaggttctccgcttcacaactcaaacattctctccattggtccttaaacactcatcagtcatcaccatggccaagctagttttttccctttgttttctgcttttcagtggctgctgcttcgctagggagcttgaggagttgaatgttcccggggaaatagtagaatccctgtcatcaagtgaagaaagcataacacgaatcaacaagaagattgagaaatttcagtctgaagagcagcaacaaactgaagatgaacttcaagataaaattcatccatttgctcaaacacagtctctagtgtacccattccccggccctatacccaacagtttaccccaaaatattcctccattaacccaaaccccggtagttgttccacccttccttcagcctgaggtcatgggtgtttccaaagtgaaggaggcaatggctccaaaacacaaggaaatgccttttccaaagtatccggttgagcctttcacagagtctcagtcgcttacgctcactgatgtggaaaatttacatctcccactgcctttgttgcaatcatggatgcatcaacctcaccagcccttgccaccaactgtcatgtttcctcctcaatcagttttgagcctctctcagagtaaggttctgcctgtgccacagaaagccgtgccttatcctcagagagacatgccaattcaagcatttcttctttaccaagaacctgttttgggaccagtacgtggaccgttcccaatcattgtcagggagctcgaggagttgaacgtgcctggcgagattgtagagtcattgagctctagtgaggagagtataacaaggatcaataaaaagattgaaaaatttcaaagcgaagagcagcaacaaacagaagatgaactgcaagacaaaattcatccttttgctcagacacagagcttggtgtatcccttcccagggccaattcccaatagtctgccccaaaacatccctcccttgacccaaacccccgtagtagtacctccattcttgcagcctgaagtgatgggggtgagtaaagtgaaggaggcaatggcccctaagcataaagagatgccattccctaaatatcccgttgagccattcaccgaatcacaatccttgacacttactgatgtcgagaatttgcacttgccactgcccttgctccaaagctggatgcaccaaccacaccaacctctgcctcccacagtgatgttcccaccccaatccgtcttgtctctgtcccagtcaaaggtgttgcctgttcctcagaaagcagttccctatccccaacgcgatatgcccatccaggcttttctcttgtatcaagaaccagtgctcggtcctgtcagaggccccttccccattatcgtgagggaactcgaggaacttaacgttccaggtgagatcgtcgagtccctctcatcttccgaagagtccattaccaggatcaacaagaagatcgagaagttccagtccgaggaacaacagcaaaccgaggatgagcttcaggacaagattcacccattcgctcagacccagtctctcgtgtatccatttccagggccaattccaaacagcctgccacagaacattccaccacttactcagaccccagttgtggtgccaccattccttcaaccagaggttatgggagtgtccaaggtgaaagaagccatggcaccaaagcacaaagagatgccctttccaaagtaccccgttgagccattcactgagtctcagtctcttaccctcaccgacgttgagaaccttcaccttccacttccattgctccagtcttggatgcatcaaccacatcagccacttccaccaaccgttatgttcccacctcagtccgtgcttagcctctctcagtctaaggttttgccagtgcctcagaaggccgttccatatccacaaagggatatgccaatccaggccttcttgctctaccaagagccagttcttggaccagtgagaggcccatttccaatcattgtgcgcgaactggaagagttgaacgtaccaggagagattgtagaatcactgagctcctcagaggagtctattactcgtatcaacaagaagatagagaagttccaatccgaggagcaacaacaaacagaggacgaattgcaggacaagatacatcctttcgcacagacccagagcctcgtctatccctttccaggtccaatccctaactctctcccccagaatatcccacccttgactcagactcccgtggtcgtaccccctttcttgcaacccgaggtgatgggggtttctaaagtcaaagaggctatggctcctaaacataaggaaatgccttttcccaaatatccagtggagccattcactgagagccagtctctgacacttacagatgtggaaaacttgcacctgcccttgccacttttgcagtcctggatgcaccaaccacatcaacccttgccccccacagtgatgtttcctccacaatcagttcttagtctctcccaaagcaaagtccttccagtgcctcagaaggccgtcccatacccccagagagatatgccaatacaggcattcttgctttaccaggaaccagtgctcggtcctgtacgtggcccattccctatcatagtgtaaatatgaagatgaagatgaaatatttggtgtgtcaaataaaaagcttgtgtgcttaagtttgtgtttttttcttggcttgttgtgttatgaatttgtggctttttctaatatcaaatgaatgtaagatctcattataatgaataaacaaatgtttctataatccattgtgaatgttttgttggatctcttctgcagcatataactactgtatgtgctatggtatggactatggaatatgattaaagataaatctcgtctctgttatgcttaagaagttcaatgtttcgtttcatgtaaaactttggtggtttgtgttttggggccttgtataatccctgatgaataagtgttctactatgtttccgttcctgttatctctttctttctaatgacaagtcgaacttcttctttatcatcgcttcgtttttattatctgtgcttcttttgtttaatacgcctgcaaagtgactcgactctgtttagtgcagttctgcgaaacttgtaaatagtccaattgttggcctctagtaatagatgtagcgaaagtgttgagctgttgggttctaaggatggcttgaacatgttaatcttttaggttctgagtatgatgaacattcgttgttgc

SEQ ID NO: 911 - DNA, 3358 bp, synthetic construct; identical to SEQ ID NO: 905
  misc_feature 1..3358: note = ARDV-16 selection marker
  source 1..3358: mol_type = other DNA

SEQ ID NO: 912 - DNA, 4006 bp, synthetic construct
  misc_feature 1..4006: note = ARDV-16 GOI
  source 1..4006: mol_type = other DNA
aacacaagcttcaagttttaaaaggaaaaatgtcagccaaaaactttaaataaaatggtaacaaggaaattattcaaaaattacaaacctcgtcaaaataggaaagaaaaaaagtttagggatttagaaaaaacatcaatctagttccaccttattttatagagagaagaaactaatatataagaactaaaaaacagaagaatagaaaaaaaaagtattgacaggaaagaaaaagtagctgtatgcttataagtactttgaggatttgaattctctcttataaaacacaaacacaatttttagattttatttaaataatcatcaatccgattataattatttatatatttttctattttcaaagaagtaaatcatgagcttttccaactcaacatctattttttttctctcaacctttttcacatcttaagtagtctcaccctttatatatataacttatttcttaccttttacattatgtaacttttatcaccaaaaccaacaactttaaaattttattaaatagactccacaagtaacttgacactcttacattcatcgacattaacttttatctgttttataaatattattgtgatataatttaatcaaaataaccacaaactttcataaaaggttcttattaagcatggcatttaataagcaaaaacaactcaatcactttcatataggaggtagcctaagtacgtactcaaaatgccaacaaataaaaaaaaagttgctttaataatgccaaaacaaattaataaaacacttacaacaccggattttttttaattaaaatgtgccatttaggataaatagttaatatttttaataattatttaaaaagccgtatctactaaaatgatttttatttggttgaaaatattaatatgtttaaatcaacacaatctatcaaaattaaactaaaaaaaaaataagtgtacgtggttaacattagtacagtaatataagaggaaaatgagaaattaagaaattgaaagcgagtctaatttttaaattatgaacctgcatatataaaaggaaagaaagaatccaggaagaaaagaaatgaaaccatgcatggtcccctcgtcatcacgagtttctgccatttgcaatagaaacactgaaacacctttctctttgtcacttaattgagatgccgaagccacctcacaccatgaacttcatgaggtgtagcacccaaggcttccatagccatgcatactgaagaatgtctcaagctcagcaccctacttctgtgacgtgtccctcattcaccttcctctcttccctataaataaccacgcctcaggttctccgcttcacaactcaaacattctctccattggtccttaaacactcatcagtcatcaccatggccaagctagttttttccctttgttttctgcttttcagtggctgctgcttcgctgcaacatctacacatacttccggaggatgtggttgtcagcctccacctccagtacatttgcctcccccagttcacctgcccccaccagtccaccttcctccacctgttcatctgccaccacccgtacacttgccacctcctgtccatctcccaccacccgtgcatgtccctcccccagtgcatctgcccccacctccatgtcattatccaacccagccaccccgtcctcaaccccatccacagcctcatccctgtccttgtcagcaacctcacccatcaccatgtcaacgcgaactggaagagttgaacgtaccaggagagattgtagaatcactgagctcctcagaggagtctattactcgtatcaacaagaagatagagaagttccaatccgaggagcaacaacaaacagaggacgaattgcaggacaagatacatcctttcgcacagacccagagcctcgtctatccctttccaggtccaatccctaactctctcccccagaatatcccacccttgactcagactcccgtggtcgtaccccctttcttgcaacccgaggtgatgggggtttctaaagtcaaagaggctatggctcctaaacataaggaaatgccttttcccaaatatccagtggagccattcactgagagccagtctctgacacttacagatgtggaaaacttgcacctgcccttgccacttttgcagtcctggatgcaccaaccacatcaacccttgccccccacagtgatgtttcctccacaatcagttcttagtctctcccaaagcaaagtccttccagtgcctcagaaggccgtcccatacccccagagagatatgccaatacaggcattcttgctttaccaggaaccagtgctcggtcctgtacgtggcccattccctatcatagtgtaaaaagcagaatgctgagctaaaagaaaggctttttccattttcgagagacaatgagaaaagaagaagaagaagaagaagaagaagaagaagaaaagagtaaataataaagccccacaggaggcgaagttcttgtagctccatgttatctaagttattgatattgtttgccctatattttatttctgtcattgtgtatgttttgttcagtttcgatctccttgcaaaatgcagagattatgagatgaataaactaagttatattattatacgtgttaatattctcctcctctctctagctagccttttgttttctctttttcttatttgattttctttaaatcaatccattttaggagagggccagggagtgatccagcaaaacatgaagattagaagaaacttccctcttttttttcctgaaaacaatttaacgtcgagatttatctctttttgtaatggaatcatttctacagttatgactcgattaaaatcccaattatatttggtctaatttagtttggtattgagtaaaacaaattcgaaccaaaccaaaatataaatatatagtttttatatatatgcctttaagactttttatagaattttctttaaaaaatatctagaaatatttgcgactcttctggcatgtaatatttcgttaaatatgaagtgctccatttttattaactttaaataattggttgtacgatcactttcttatcaagtgttactaaaatgcgtcaatctctttgttcttccatattcatatgtcaaaatctatcaaaattcttatatatctttttcgaatttgaagtgaaatttcgataatttaaaattaaatagaacatatcattatttaggtatcatattgatttttatacttaattactaaatttggttaactttgaaagtgtacatcaacgaaaaattagtcaaacgactaaaataaataaatatcatgtgttattaagaaaattctcctataagaatattttaatagatcatatgtttgtaaaaaaaattaatttttactaacacatatatttacttatcaaaaatttgacaaagtaagattaaaataatattcatctaacaaaaaaaaaaccagaaaatgctgaaaacccggcaaaaccgaaccaatccaaaccgatatagttggtttggtttgattttgatataaaccgaaccaactcggtccatttgcacccctaatcataatagctttaatatttcaagatattattaagttaacgttgtcaatatcctggaaattttgcaaaatgaatcaagcctatatggctgtaatatgaatttaaaagcagctcgatgtggtggtaatatgtaatttacttgattctaaaaaaatatcccaagtattaataatttctgctaggaagaaggttagctacgatttacagcaaagccagaatacaaagaaccataaagtgattgaagctcgaaatatacgaaggaacaaatatttttaaaaaaatacgcaatgacttggaacaaaagaaagtgatatattttttgttcttaaacaagcatcccctctaaagaatggcagttttcctttgcatgtaactattatgctcccttcgttacaaaaattttggactactattgggaacttcttctgaaaatagt

SEQ ID NO: 913 - protein, 209 aa, synthetic construct; identical to SEQ ID NO: 6

SEQ ID NO: 914 - protein, 169 aa, synthetic construct; identical to SEQ ID NO: 4

SEQ ID NO: 915 - protein, 199 aa, synthetic construct; identical to SEQ ID NO: 8

SEQ ID NO: 916 - protein, 207 aa, synthetic construct; identical to SEQ ID NO: 84

SEQ ID NO: 917 - DNA, 1323 bp, synthetic construct; identical to SEQ ID NO: 851
  source 1..1323: mol_type = other DNA

SEQ ID NO: 918 - protein, 440 aa, synthetic construct; identical to SEQ ID NO: 852

SEQ ID NO: 919 - DNA, 1356 bp, synthetic construct
  source 1..1356: mol_type = other DNA
atgggtgtgaagcacaccaccaccaccaccaccacaattcttttcacttcaatgctacttcacctctccatcatagccattgccaacgatccatgcgcttctcaacacgacgacgacgactccgacatcaccatgattcccatctacggcaattgctcgcctttcaagaactactcaacctcgtgggagaacatcatcatcgacatggcctccaaggacccagaaagagtcgtgtacttgtctagcctcgacgcctcattgaggagaaagcccatttccgcagccccaatcgcttcgggccaagccttcgggattggtagctacgtggtccgagtgaaactgggttcgccgaaccaactattttttatggttctggataccagcaccgatgaggcttgggtaccgtgtaccggctgcactggttgctcttcctcctccacctattattcccctcaagcctccaccacttatggcggcgccgtagcttgctacgccccgcgttgtgcccaggctcgtggtgccctcccttgcccctacactggttctaaagcttgcacattcaaccaatcctatgcaggctccacattctccgccactctcgtgcaagactctctcagattgggcatcgacaccctaccaagctacgctttcgggtgcgtcaactctgcctccggctggacgctcccggcccaaggcctattgggcttgggccgcgggcccttgtcacttccttcccaatcctccaaactctactccggcattttctcctactgcctcccaagtttccagtcctcctacttctctgggtccctcaaacttgggcccacgggccagcctaggcgaatccggaccaccccgctcctccaaaacccgcgtcggccctctctttactacgtgaacctcaccggcgtcaccgtgggccgggttaaggtcccattacccatagaatatctggcgttcgacccgaataagggctccggaaccatcctagattctggcacggtcataacccggttcgtaggaccggtttacagtgcaataagggatgagtttagaaaccaagtgaagggaccgttcttcagcagaggtggtttcgacacgtgctttgtgaaaacctacgagaatttgacgcccttgatcaagcttcgcttcacgggcttggatgtgactttgccctacgagaacaccctcatacacaccgcctacggcggcatggcgtgcttggcgatggcggcggcgccgaataacgtgaactcggtgctcaatgtcattgccaactatcagcaacagaaccttagagttttgtttgataccgttaataatagggttggcatagcgcgtgagctttgtaactag

SEQ ID NO: 920 - protein, 451 aa, synthetic construct
MGVKHTTTTTTTILFTSMLLHLSIIAIANDPCASQHDDDDSDITMIPIYGNCSPFKNYSTSWENIIIDMASKDPERVVYLSSLDASLRRKPISAAPIASGQAFGIGSYVVRVKLGSPNQLFFMVLDTSTDEAWVPCTGCTGCSSSSTYYSPQASTTYGGAVACYAPRCAQARGALPCPYTGSKACTFNQSYAGSTFSATLVQDSLRLGIDTLPSYAFGCVNSASGWTLPAQGLLGLGRGPLSLPSQSSKLYSGIFSYCLPSFQSSYFSGSLKLGPTGQPRRIRTTPLLQNPRRPSLYYVNLTGVTVGRVKVPLPIEYLAFDPNKGSGTILDSGTVITRFVGPVYSAIRDEFRNQVKGPFFSRGGFDTCFVKTYENLTPLIKLRFTGLDVTLPYENTLIHTAYGGMACLAMAAAPNNVNSVLNVIANYQQQNLRVLFDTVNNRVGIARELCN

SEQ ID NO: 921 - DNA, 1143 bp, synthetic construct; identical to SEQ ID NO: 853
  source 1..1143: mol_type = other DNA

SEQ ID NO: 922 - protein, 380 aa, synthetic construct; identical to SEQ ID NO: 854

SEQ ID NO: 923 - DNA, 1140 bp, synthetic construct; identical to SEQ ID NO: 855
  source 1..1140: mol_type = other DNA

SEQ ID NO: 924 - protein, 379 aa, synthetic construct; identical to SEQ ID NO: 856

SEQ ID NO: 925 - DNA, 2283 bp, synthetic construct
  source 1..2283: mol_type = other DNA
atggaggcaaagcgaggccatgccctcatgtgcttggcacgtgtttcactcttcctctgcgctctaaccctatccgctgctcacggaagcaccacggttcaagacatcgcgagaaagttgaaactcggggacaacgagcttctgcgcacggagaagaagttcaaggttttcatggagaattacgggaggagctactccacagaggaggagtatttgcgccgtttggggattttcgcccagaacatggtcagagcggcggagcatcaggcgctggaccccaccgccgtccacggcgtcacgcagttctccgatctcaccgaggacgagtttgagaagctctacactggcgtcaatggcggcttcccgtcatcgaataatgccgccggcggtattgcgccgccgttggaggtggacgggctgccggagaattttgattggagagagaaaggagctgtcaccgaagttaagttacagggtagatgtggatcatgctgggctttcagcaccacaggatctatagaaggagccaattttcttgccaccggaaagctcgtcagtcttagtgaacaacagctccttgactgtgacaacaagtgtgacataacagaaaagacttcatgtgacaatgggtgtaatggaggtcttatgacaaatgcctacaattatttgctcgagtctggtgggttggaggaggagtcttcatatccctacactggggagagaggtgaatgcaagtttgatccagagaaaatagcagttaagatcacaaatttcaccaatatccctgctgatgagaaccaaattgccgcatatttagtaaaaaatggtccacttgctatgggcgtgaatgcaattttcatgcaaacatacattggtggtgtctcatgccctctcatatgtagcaagaaaaggctgaaccatggtgtgttacttgtgggatatggtgcaaaaggcttctcaattcttaggcttggcaacaaaccatactggatcatcaagaattcgtggggggagaaatggggagaagatggctattacaagctctgcagagggcatggcatgtgtggaataaacactatggtttctgctgcaatggtgcctcaaccacaaacaacacctacaaagaattatgcttcttattagatgggtttccttgtgttgcttcttttctccctcttaggtctctcttctagttccagcatatcaactcatcgttccatattggaccttgacctaaccaagtttaccacacagaaacaggtgtcttcactgttccaactatggaagagtgagcatggacgtgtctaccataaccacgaagaagaggcaaagagacttgagattttcaagaataacttgaactatatcagggacatgaatgcaaacagaaaatcaccccattctcatcgtttaggattgaacaagtttgctgacatcactcctcaagagttcagcaaaaagtacttgcaagctcccaaggatgtgtcgcagcaaatcaaaatggccaacaagaaaatgaagaaggaacaatattcttgtgaccatccacctgcatcatgggattggaggaaaaaaggtgtcatcacccaagtaaagtaccaagggggctgtggaagcggttgggcgttttctgccacgggagccatagaagcagcacatgcaatagcaacaggagaccttgttagcctttctgaacaagaactcgtagactgtgtggaagaaagcgaaggttgttacaatggatggcactatcaatcgttcgaatgggttttagaacatggtgggattgccactgatgatgattatccttacagagctaaagagggtagatgcaaagccaataagatacaagacaaggttacaattgacggatatgaaactctaataatgtcagatgagagtacagaatcagagacagagcaagcgttcttaagcgccatccttgagcaaccaattagtgtctccattgatgcaaaagattttcatttatacaccgggggaatttatgatggagaaaactgtacaagtccgtatgggattaatcactttgttttacttgtgggttatggttcagcggatggtgtagattactggatagcgaaaaattcatggggagaagattggggagaagatggttacatttggatccaaagaaacacgggtaatttattaggagtgtgtgggatgaattatttcgcttcatacccaaccaaagaggaatcagaaacactggtgtctgctcgcgttaaaggtcatcgaagagttgatcactctcctctttga

SEQ ID NO: 926 - protein, 759 aa, synthetic construct
MEAKRGHALMCLARVSLFLCALTLSAAHGSTTVQDIARKLKLGDNELLRTEKKFKVFMENYGRSYSTEEEYLRRLGIFAQNMVRAAEHQALDPTAVHGVTQFSDLTEDEFEKLYTGVNGGFPSSNNAAGGIAPPLEVDGLPENFDWREKGAVTEVKLQGRCGSCWAFSTTGSIEGANFLATGKLVSLSEQQLLDCDNKCDITEKTSCDNGCNGGLMTNAYNYLLESGGLEEESSYPYTGERGECKFDPEKIAVKITNFTNIPADENQIAAYLVKNGPLAMGVNAIFMQTYIGGVSCPLICSKKRLNHGVLLVGYGAKGFSILRLGNKPYWIIKNSWGEKWGEDGYYKLCRGHGMCGINTMVSAAMVPQPQTTPTKNYASYMGFLVLLLFSLLGLSSSSSISTHRSILDLDLTKFTTQKQVSSLFQLWKSEHGRVYHNHEEEAKRLEIFKNNLNYIRDMNANRKSPHSHRLGLNKFADITPQEFSKKYLQAPKDVSQQIKMANKKMKKEQYSCDHPPASWDWRKKGVITQVKYQGGCGSGWAFSATGAIEAAHAIATGDLVSLSEQELVDCVEESEGCYNGWHYQSFEWVLEHGGIATDDDYPYRAKEGRCKANKIQDKVTIDGYETLIMSDESTESETEQAFLSAILEQPISVSIDAKDFHLYTGGIYDGENCTSPYGINHFVLLVGYGSADGVDYWIAKNSWGEDWGEDGYIWIQRNTGNLLGVCGMNYFASYPTKEESETLVSARVKGHRRVDHSPL

SEQ ID NO: 927 - DNA, 1026 bp, synthetic construct; identical to SEQ ID NO: 857
  source 1..1026: mol_type = other DNA

SEQ ID NO: 928 - protein, 341 aa, synthetic construct; identical to SEQ ID NO: 858

SEQ ID NO: 929 - DNA, 1491 bp, synthetic construct
  source 1..1491: mol_type = other DNA
atgggcaaagaaagtagtacttgtgttcttctatcccttctcattctttcactctttgtggctgaaatatatggaaatagacaagttcaagctcttaacaaactgcacaagtccaccaagttcagaggaaattcacaaattgataggagtgagtttgaggtagaggagcttgcttatgatggcattgttcactctcaagagggtctcaaagagaaagatagaattgagagtcttccaggacaaccccctgtgagtttttctcactatggagggtatgtcactgtggataaagaagcaggtcgtgccttctattattacttcgttgaagctcaacgttctaaacaaacactcccacttcttctttggctcaatggaggtcctggatgttcatctcttggctatggagcaatgcaagaacttggaccttttcgagtaaacagtgatggtaaaacactccacagaaatatattttcttggaacaaagttgcaaatgttttattcctggagtcacctgctggagtaggattttcctattcaaacaaatcaaaagattatgatacgaatggagataagaaaacagctgcagacaattatttattcttggtgaattggttggagagatatccagaatataaggaaagagatttctatattgctggggaaagctatgctgggcattatgtgcctcaatttgcacataccattctctatcataacaaaaaggcaaataagaaaatcatcaatctaaaaggaatcttgattgggaatgcagtgatcaacgaggaaactgactcggacggactgtatgattatcttgccagccatgcaatcatctcagacaaagcagcttatctcaacaaagcttgtgattcatcatcatcaaagattcaggaaagtgtgtgcgatgcagccggagatgaacttggggaggatattgaatacattgatttatacaatatttatgctccactatgcaagaatgcaaatctcacagccctgcccaaaaggaacacaattgtgactgatccatgtagtgagaattatgtgtacgcatatcttaatagaaaagatgttcaagaggctctccatgccaatgtaaccaacctcaaacatgactgggaaccctgcagcgatgtcataacaaagtgggttgatcaagcttcaacagttcttccacttttacatgaattcctcaacaatagcctcagggtttggattttcagtggtgacacagatggaagggtgcctattacatcaaccaagtattcagttaagaagatgaaccttcccattaaatctgtttggcacccttggttttcctatggagaggttggtggctatgtagaagtatacaagggaggcctaacattagctacggtgagggaagcagggcatcaagtgccaagttaccaaccagccagagccctaactttgatcaaatatttcttagacggcactcctcttcccggtcctcccaaaagaaaggactag

SEQ ID NO: 930 - protein, 496 aa, synthetic construct
MGKESSTCVLLSLLILSLFVAEIYGNRQVQALNKLHKSTKFRGNSQIDRSEFEVEELAYDGIVHSQEGLKEKDRIESLPGQPPVSFSHYGGYVTVDKEAGRAFYYYFVEAQRSKQTLPLLLWLNGGPGCSSLGYGAMQELGPFRVNSDGKTLHRNIFSWNKVANVLFLESPAGVGFSYSNKSKDYDTNGDKKTAADNYLFLVNWLERYPEYKERDFYIAGESYAGHYVPQFAHTILYHNKKANKKIINLKGILIGNAVINEETDSDGLYDYLASHAIISDKAAYLNKACDSSSSKIQESVCDAAGDELGEDIEYIDLYNIYAPLCKNANLTALPKRNTIVTDPCSENYVYAYLNRKDVQEALHANVTNLKHDWEPCSDVITKWVDQASTVLPLLHEFLNNSLRVWIFSGDTDGRVPITSTKYSVKKMNLPIKSVWHPWFSYGEVGGYVEVYKGGLTLATVREAGHQVPSYQPARALTLIKYFLDGTPLPGPPKRKD

SEQ ID NO: 931 - DNA, 1032 bp, synthetic construct
  source 1..1032: mol_type = other DNA
atgaccatgctacctcattcattaactatgattgcaacactaataatcatttttcttgcacaaacacttgtgggggtgagttcacttcctgaagctgataaaataaccaatttgccggggcagccacgggtcgaatttcagcaatattctggttatgtcaccgtggatgatcaaaatcaaagagctttgttttactactttgttgaggctgaagaaaacccttcttccaagccattagtcctatggttgaatggagggcccggttgttcatcgattggagttggagcttttgctgagcatggtcctttcagaccaagtgacaacaatgttcttgagataaatgataaaagttggaacaaagtggcaaatgtgctatacttggagtcaccagcgggtgttggattctcttactctagcaatgaatctttttatgccttagtgacagatgaaatcacagctagggataatcttgttttcctacagcgttggttcactaaattccctgagtactcaaataacgacttcttcatttcaggggagagctatggaggtcactatgttccacaacttgcacaacttattgttcaaaccaagaccaacttcaatctcaagggaatagcaatagggaatcctcttcttgagtttaatactgatttcaactcaagatctgagtacctgtggtcccacggactgatatcagattcaacatacgaagtcttaactagagtctgcaacttttcctcaattaggagacaaatgcaaaatgggaatcttagaggggtttgtggaaaagcaaataagctattggatagtgagattagcaactatgtagatgaatatgatgtcactcttgatgtttgtttgtcatcagtaaatcaacaggcttatgtgctgaatcaactgcaagagacacagaagatagatgtttgtattggtgataaaacaactacatacttgaacactaaagaagtccaagaagctctgcatgctaatcttgttggagtcgccaaatggtcaacttgcagctcgtaa

SEQ ID NO: 932 - protein, 343 aa, synthetic construct
MTMLPHSLTMIATLIIIFLAQTLVGVSSLPEADKITNLPGQPRVEFQQYSGYVTVDDQNQRALFYYFVEAEENPSSKPLVLWLNGGPGCSSIGVGAFAEHGPFRPSDNNVLEINDKSWNKVANVLYLESPAGVGFSYSSNESFYALVTDEITARDNLVFLQRWFTKFPEYSNNDFFISGESYGGHYVPQLAQLIVQTKTNFNLKGIAIGNPLLEFNTDFNSRSEYLWSHGLISDSTYEVLTRVCNFSSIRRQMQNGNLRGVCGKANKLLDSEISNYVDEYDVTLDVCLSSVNQQAYVLNQLQETQKIDVCIGDKTTTYLNTKEVQEALHANLVGVAKWSTCSS

SEQ ID NO: 933 - DNA, 2283 bp, synthetic construct; identical to SEQ ID NO: 859
  source 1..2283: mol_type = other DNA

SEQ ID NO: 934 - protein, 760 aa, synthetic construct; identical to SEQ ID NO: 860

SEQ ID NO: 935 - DNA, 468 bp, synthetic construct; identical to SEQ ID NO: 849
  source 1..468: mol_type = other DNA

SEQ ID NO: 936 - protein, 156 aa, synthetic construct; identical to SEQ ID NO: 850

SEQ ID NO: 937 - DNA, 606 bp, synthetic construct
  source 1..606: mol_type = other DNA
tcaagctttacatcccagaatcccatagaactcccaagtgcaagtccaaaaccaaatccagtcctcgacactaacggcaacgaactgaacccaaacagtagttataggatcatcagtaccttttggggggcccttggcggtgatgtgtatcttggaaagagtccacgttcatctgccccctgcctggatggagtattccgctataactccgatgttgggacagtggggacaccagtaagatttatacccttgtccggtgggatttttgaggatcaactcatggaccttcagttcaatatcgccacagttaaattgtgtgtttcctataccatttggaaggccggcaatcttaacgcatactaccgtgccatgttgctggaaactgaaggaagcataggccaagtggacagttcttatttcaagattgtaaaggcatcaactttcggatacaatcttctttactgtcctatcaccaggccagtcctttgtcctttctgtagaggggatggattctgtgcaaaggtgggcgtaataaaccaagacggccgccgtagactggcacttgtaaatgaaaacccactcggggtatatttcaagaaggtttag

SEQ ID NO: 938 - protein, 201 aa, synthetic construct
SSFTSQNPIELPSASPKPNPVLDTNGNELNPNSSYRIISTFWGALGGDVYLGKSPRSSAPCLDGVFRYNSDVGTVGTPVRFIPLSGGIFEDQLMDLQFNIATVKLCVSYTIWKAGNLNAYYRAMLLETEGSIGQVDSSYFKIVKASTFGYNLLYCPITRPVLCPFCRGDGFCAKVGVINQDGRRRLALVNENPLGVYFKKV

SEQ ID NO: 939 - DNA, 252 bp, synthetic construct; identical to SEQ ID NO: 839
  source 1..252: mol_type = other DNA

SEQ ID NO: 940 - protein, 84 aa, synthetic construct; identical to SEQ ID NO: 840

SEQ ID NO: 941 - DNA, 603 bp, synthetic construct
  source 1..603: mol_type = other DNA
tcgacttttacttctcagaacttaatagacctacccagtgagagtccccttccaaagccagttttagatacaaatggaaaggaactaaaccctaattcttcttaccgaatcatttcaatagggcgtggagcacttggtggtgatgtttatttggggaaatccccaaattcagatgctccttgcccagatggagtgtttaggtataacagtgacgtggggccatccggaacacctgtcaggttcattccactctcaaccaatatttttgaggaccagttattgaacatacagttcaacatcccgacagtgaagctttgtgttagctacaccatctggaaggttggtaatcttaacgcttacttccgcaccatgctgttggagactggtggaactattggccaagcagataattcatattttaagattgttaaatctagcaaaattggttataatctactgtcttgtcctttcacgtccatcatatgcttgcggtgccctgaagatcaattttgtgctaaagttggcgttgtcattcaaaatggcaaaagaagacttgccctcgtaaatgaaaatcctttggatgtactctttcaagaagtgtga

SEQ ID NO: 942 - protein, 200 aa, synthetic construct
STFTSQNLIDLPSESPLPKPVLDTNGKELNPNSSYRIISIGRGALGGDVYLGKSPNSDAPCPDGVFRYNSDVGPSGTPVRFIPLSTNIFEDQLLNIQFNIPTVKLCVSYTIWKVGNLNAYFRTMLLETGGTIGQADNSYFKIVKSSKIGYNLLSCPFTSIICLRCPEDQFCAKVGVVIQNGKRRLALVNENPLDVLFQEV

SEQ ID NO: 943 - DNA, 576 bp, synthetic construct; identical to SEQ ID NO: 847
  source 1..576: mol_type = other DNA

SEQ ID NO: 944 - protein, 192 aa, synthetic construct; identical to SEQ ID NO: 848

SEQ ID NO: 945 - DNA, 468 bp, synthetic construct; identical to SEQ ID NO: 849
  source 1..468: mol_type = other DNA

SEQ ID NO: 946 - protein, 156 aa, synthetic construct; identical to SEQ ID NO: 850

SEQ ID NO: 947 - DNA, 606 bp, synthetic construct; identical to SEQ ID NO: 937
  source 1..606: mol_type = other DNA

SEQ ID NO: 948 - protein, 201 aa, synthetic construct; identical to SEQ ID NO: 938

SEQ ID NO: 949 - DNA, 252 bp, synthetic construct; identical to SEQ ID NO: 839
  source 1..252: mol_type = other DNA

SEQ ID NO: 950 - protein, 84 aa, synthetic construct; identical to SEQ ID NO: 840

SEQ ID NO: 951 - DNA, 603 bp, synthetic construct; identical to SEQ ID NO: 941
  source 1..603: mol_type = other DNA

SEQ ID NO: 952 - protein, 200 aa, synthetic construct; identical to SEQ ID NO: 942

SEQ ID NO: 953 - DNA, 576 bp, synthetic construct; identical to SEQ ID NO: 847
  source 1..576: mol_type = other DNA

SEQ ID NO: 954 - protein, 192 aa, synthetic construct; identical to SEQ ID NO: 848

SEQ ID NO: 955 - protein, 16 aa, Bos taurus
FQSEEQQQTEDELQDK

SEQ ID NO: 956 - protein, 10 aa, Bos taurus
NVPGEIVESL

SEQ ID NO: 957 - protein, 36 aa, Volvox carteri
  MOD_RES 28: note = hydroxyproline
  MOD_RES 31..32: note = hydroxyproline
  MOD_RES 34: note = hydroxyproline
  MOD_RES 36: note = hydroxyproline
IYPSVGSSSIVTPSWTAIGGSTLPLPLPNAPPSPLP

SEQ ID NO: 958 - protein, 15 aa, Physcomitrella patens
  MOD_RES 1: note = hydroxyproline
  CARBOHYD 1: note = glycosylated
  MOD_RES 3..5: note = hydroxyproline
  MOD_RES 9: note = hydroxyproline
  MOD_RES 12: note = hydroxyproline
  MOD_RES 14: note = hydroxyproline
PVPPPAGSPFQPVPS

SEQ ID NO: 959 - protein, 123 aa, Physcomitrium sp.
MASSNTMSVAAALCLVTLFASVIVQVAAQEPASAPTATPPVGAPTVPPPAGSPFQPPTSSPPAASGPASVPPPPSPSAETPTATDSPPAAEGPGPATTPSSDAFTVAPTVSIVLMSTLAYLLY

SEQ ID NO: 960 - protein, 20 aa, Physcomitrella patens
  MOD_RES 4: note = hydroxyproline
  MOD_RES 10..11: note = hydroxyproline
  MOD_RES 14..15: note = hydroxyproline
  MOD_RES 18: note = hydroxyproline
SAGPVMAVVPPVTPPVTPSV

SEQ ID NO: 961 - protein, 19 aa, Physcomitrella patens
  MOD_RES 2: note = hydroxyproline
  MOD_RES 8..9: note = hydroxyproline
  MOD_RES 13..14: note = hydroxyproline
  MOD_RES 16: note = hydroxyproline
  MOD_RES 18: note = hydroxyproline
SPASSAGPPMGSPPSPAPA

SEQ ID NO: 962 - protein, 18 aa, Physcomitrella patens
  MOD_RES 2: note = hydroxyproline
SPLTKAEVFYELKDLKGY

SEQ ID NO: 963 - protein, 20 aa, Pinus taeda
  MOD_RES 5: note = hydroxyproline
  MOD_RES 12: note = hydroxyproline
ASEAPLSSAQAPKSALRHRA

SEQ ID NO: 964 - protein, 120 aa, Pinus jeffreyi
METSTRSAVLLSLIAAAMMIHCCLADHQQYKVDESHEQWGFLTNNKAWSYILASEAPLSSAQAPKSALRHRAKASSAPVASSPSVSPSPTAAEAVPSASSTSESPASSPATPPAQNGSPS

SEQ ID NO: 965 - protein, 8 aa, Pseudotsuga menziesii
  MOD_RES 3..7: note = hydroxyproline
  CARBOHYD 7: note = glycosylated
KSPPPPPY

SEQ ID NO: 966 - protein, 14 aa, Pseudotsuga menziesii
  MOD_RES 3..6: note = hydroxyproline
  MOD_RES 10: note = hydroxyproline
  MOD_RES 12: note = hydroxyproline
LSPPPPYPAPAPYY

SEQ ID NO: 967 - protein, 8 aa, Pseudotsuga menziesii
  MOD_RES 3: note = hydroxyproline
  MOD_RES 6..7: note = hydroxyproline
AVPVSPPY

SEQ ID NO: 968 - protein, 16 aa, Pseudotsuga menziesii
  MOD_RES 4: note = hydroxyproline
  CARBOHYD 4: note = glycosylated
  MOD_RES 10: note = hydroxyproline
  CARBOHYD 10: note = glycosylated
  MOD_RES 12: note = hydroxyproline
  CARBOHYD 12: note = glycosylated
  MOD_RES 15: note = hydroxyproline
  CARBOHYD 15: note = glycosylated
ALPPYATVSPPPYPPG

SEQ ID NO: 969 - protein, 7 aa, Pseudotsuga menziesii
  MOD_RES 3..4: note = hydroxyproline
  MOD_RES 6: note = hydroxyproline
  CARBOHYD 6: note = glycosylated
ASPPAPT

SEQ ID NO: 970 - protein, 10 aa, Pseudotsuga menziesii
  MOD_RES 3..4: note = hydroxyproline
  MOD_RES 6: note = hydroxyproline
  MOD_RES 8: note = hydroxyproline
KPPPAPTPVV

SEQ ID NO: 971 - protein, 8 aa, Pseudotsuga menziesii
  MOD_RES 3..5: note = hydroxyproline
KSPPPTHT

SEQ ID NO: 972 - protein, 200 aa, Nothotsuga longibracteata
MALLAGMSFIRNLLLVLIVGCIYAANPSAASYYKSPPPKPYPYKSPPPPSHVPSPVHYKPPPAPTPVPKPPVVEKPPPKAVPISPPYKYKSPPPPKPIPAPYAKPPPVHKPLPPPSPPKSWPSPLPPHHKPSPVTKPPKATPSPPEKPYGYKSPPPPAHVVSPAPPKAVTAFPPPHPKPPVYPSPPTHHYFYKSPPPPPY

SEQ ID NO: 973 - protein, 27 aa, Pseudotsuga menziesii
  MOD_RES 3: note = hydroxyproline
  MOD_RES 5: note = hydroxyproline
  MOD_RES 10: note = hydroxyproline
  MOD_RES 15..16: note = hydroxyproline
  MOD_RES 21: note = hydroxyproline
  MOD_RES 23: note = hydroxyproline
KPPVPVIPPPVVKPPPVYKPPVPVIPP

SEQ ID NO: 974 - protein, 16 aa, Pseudotsuga menziesii
  MOD_RES 1: note = hydroxyproline
  MOD_RES 6: note = hydroxyproline
  VARIANT 12: note = P or hydroxyproline
PVVKPPVYKIPXVIKP

SEQ ID NO: 975 - protein, 10 aa, Lollium multiflorum
  MOD_RES 4: note = hydroxyproline
  MOD_RES 6: note = hydroxyproline
  MOD_RES 8: note = hydroxyproline
AEAPAPAPAS

SEQ ID NO: 976 - protein, 344 aa, Picea engelmannii
MGFKCRLYFAILLWLCIQATCCRAHDRVLVRDRVLPTTKTGIVGVALAAAKNATKSVTPVASPKPSETKPEAPTAAPKAPPISKAPPAKAPSVPPPLSSASPPSKAPAKSPPKTPPIPKAPVAAPVSPPPKAGPSKKPPVLAPSKAPSASHGAAPVSSPPAPAPPKHKKPTEAPAPAPPKHKKPTEAPAPAPPKHKKPTEAPSPAPSHHKKPAEAPAPAPASSKHKPHVETPAPAPAKHKRPVEAPTPASEEAPTPAPAPAKHKKKKKKPKHPKKNQKHHHHHAPAPAPVVSPPAPPLSPEPSTSEDLSVPAPAPDSPNGGMKSFVAGIWRTLVVASILVIFMA

SEQ ID NO: 977 - protein, 11 aa, Hordeum vulgare
  VARIANT 4: note = E or V
  MOD_RES 5: note = hydroxyproline
  MOD_RES 7: note = hydroxyproline
QAAXPSPAAEV

SEQ ID NO: 978 - protein, 4 aa, Hordeum vulgare
  MOD_RES 1: note = hydroxyproline
PTGD

SEQ ID NO: 979 - protein, 15 aa, Secale cereale
  MOD_RES 5: note = hydroxyproline
  MOD_RES 7: note = hydroxyproline
  MOD_RES 12: note = hydroxyproline
YADVPSPAAEGPAVD

SEQ ID NO: 980 - protein, 11 aa, Triticum aestivum
  MOD_RES 2: note = hydroxyproline
  MOD_RES 4: note = hydroxyproline
  MOD_RES 9: note = hydroxyproline
VPSPAAQAPTA

SEQ ID NO: 981 - protein, 14 aa, Triticum aestivum
  MOD_RES 5: note = hydroxyproline
  MOD_RES 7: note = hydroxyproline
  VARIANT 8: note = A, H or M
  MOD_RES 11: note = hydroxyproline
YAEVPSPXQAPTAD

SEQ ID NO: 982 - protein, 15 aa, Triticum durum
  MOD_RES 5: note = hydroxyproline
  MOD_RES 7: note = hydroxyproline
  VARIANT 9: note = A, H or M
  MOD_RES 12: note = hydroxyproline
YAEVPSPAXQAPTAD

SEQ ID NO: 983 - protein, 15 aa, Triticum spelta
  MOD_RES 5: note = hydroxyproline
  MOD_RES 7: note = hydroxyproline
  VARIANT 9: note = A, H or M
  MOD_RES 12: note = hydroxyproline
YAEVPSPAXQAPTAD

SEQ ID NO: 984 - protein, 15 aa, Triticosecale sp.
  MOD_RES 5: note = hydroxyproline
  MOD_RES 7: note = hydroxyproline
  VARIANT 9: note = A, H or M
  MOD_RES 12: note = hydroxyproline
  VARIANT 14: note = V or A
YAEVPSPAXQAPTXD

SEQ ID NO: 985 - protein, 16 aa, Triticosecale sp.
  MOD_RES 6: note = hydroxyproline
  MOD_RES 8: note = hydroxyproline
  VARIANT 10: note = A, H or M
  MOD_RES 13: note = hydroxyproline
  VARIANT 15: note = V or A
VYAEVPSPAXQAPTXD

SEQ ID NO: 986 - protein, 10 aa, Zea mays
  MOD_RES 2..3: note = hydroxyproline
  MOD_RES 9..10: note = hydroxyproline
APPAHFPSPP

SEQ ID NO: 987 - protein, 21 aa, Zea mays
  MOD_RES 7..9: note = hydroxyproline
  MOD_RES 11: note = hydroxyproline
  CARBOHYD 11: note = glycosylated
  CARBOHYD 14: note = glycosylated
  MOD_RES 14..17: note = hydroxyproline
  MOD_RES 19..20: note = hydroxyproline
NGPKHHPPPSPANPPPPEPPY

SEQ ID NO: 988 - protein, 6 aa, Zea mays
  MOD_RES 2..3: note = hydroxyproline
SPPAHH

SEQ ID NO: 989 - protein, 8 aa, Zea mays
  MOD_RES 2..5: note = hydroxyproline
NPPPPAHY

SEQ ID NO: 990 - protein, 10 aa, Zea mays
  MOD_RES 3..6: note = hydroxyproline
HAPPPPFASY

SEQ ID NO: 991 - protein, 12 aa, Zea mays
  MOD_RES 2..5: note = hydroxyproline
  MOD_RES 10..12: note = hydroxyproline
APPPPAHHHPPP

SEQ ID NO: 992 - protein, 9 aa, Zea mays
  MOD_RES 3..5: note = hydroxyproline
NAPPPAAHY

SEQ ID NO: 993 - protein, 9 aa, Zea mays
  MOD_RES 2..4: note = hydroxyproline
  MOD_RES 9: note = hydroxyproline
APPPYFPTP

SEQ ID NO: 994 - protein, 7 aa, Zea mays
  MOD_RES 2..3: note = hydroxyproline
APPAPAP

SEQ ID NO: 995 - protein, 12 aa, Zea mays
  MOD_RES 2..4: note = hydroxyproline
  MOD_RES 7: note = hydroxyproline
  MOD_RES 9: note = hydroxyproline
SPPPHSPSPGHY

SEQ ID NO: 996 - protein, 12 aa, Zea mays
  MOD_RES 3..4: note = hydroxyproline
  MOD_RES 8: note = hydroxyproline
ASPPYFPPHGAY

SEQ ID NO: 997 - protein, 23 aa, Zea mays
  MOD_RES 2..4: note = hydroxyproline
  MOD_RES 9..10: note = hydroxyproline
  MOD_RES 18..20: note = hydroxyproline
APPPHFPSPPAANANAAPPPAHY

SEQ ID NO: 998 - protein, 19 aa, Zea mays
  MOD_RES 2..4: note = hydroxyproline
  MOD_RES 9..11: note = hydroxyproline
  MOD_RES 15..17: note = hydroxyproline
APPPHFPSPPPHHHPPPYA

SEQ ID NO: 999 - protein, 11 aa, Zea mays
  MOD_RES 3..5: note = hydroxyproline
  MOD_RES 10..11: note = hydroxyproline
AAPPPHFPSPP

SEQ ID NO: 1000 - protein, 10 aa, Zea mays
  MOD_RES 4..6: note = hydroxyproline
  CARBOHYD 6: note = glycosylated
NAAPPPAAYY

SEQ ID NO: 1001 - protein, 11 aa, Zea mays
  MOD_RES 3: note = hydroxyproline
  MOD_RES 5: note = hydroxyproline
HVPSPSENGPK

SEQ ID NO: 1002 - protein, 16 aa, Zea mays
  MOD_RES 3..4: note = hydroxyproline
  MOD_RES 6: note = hydroxyproline
  CARBOHYD 6: note = glycosylated
  CARBOHYD 9: note = glycosylated
  MOD_RES 9..12: note = hydroxyproline
  MOD_RES 14..15: note = hydroxyproline
HHPPSPAEPPPPEPPY

SEQ ID NO: 1003 - protein, 13 aa, Zea mays
  MOD_RES 2..3: note = hydroxyproline
  MOD_RES 7: note = hydroxyproline
  CARBOHYD 7: note = glycosylated
  CARBOHYD 11: note = glycosylated
  MOD_RES 11..12: note = hydroxyproline
SPPGGTPAPNPPI

SEQ ID NO: 1004 - protein, 6 aa, Zea mays
  MOD_RES 2..4: note = hydroxyproline
APPPHF

SEQ ID NO: 1005 - protein, 12 aa, Zea mays
  MOD_RES 2..3: note = hydroxyproline
  MOD_RES 9..10: note = hydroxyproline
  VARIANT 11: note = T OR A
APPAHFPSPPXF

SEQ ID NO: 1006 - protein, 25 aa, Zea mays
  MOD_RES 3..5: note = hydroxyproline
  MOD_RES 7: note = hydroxyproline
  CARBOHYD 10: note = glycosylated
  MOD_RES 10..13: note = hydroxyproline
  MOD_RES 15..16: note = hydroxyproline
  MOD_RES 18: note = hydroxyproline
  CARBOHYD 18: note = glycosylated
  MOD_RES 20..22: note = hydroxyproline
HHPPPSPAEPPPPEPPEPAPPPEFP

SEQ ID NO: 1007 - protein, 24 aa, Zea mays
  MOD_RES 3..6: note = hydroxyproline
  MOD_RES 11..14: note = hydroxyproline
  CARBOHYD 14: note = glycosylated
  MOD_RES 18..20: note = hydroxyproline
  MOD_RES 22..23: note = hydroxyproline
  CARBOHYD 22..23: note = glycosylated
HAPPPPAAHAPPPPFPSPPPAPPF

SEQ ID NO: 1008 - protein, 240 aa, Phacelia campanularia
MGSHMASLVIAILVAIVSLSLPSTTSANYKYTSPPPPLKKYPPPHYIYKSPPPPPPVHKYPPPHHPIHKSPPAHHPVYKSPPPPPHHKKPYKYKSPPPPPPPVHKYPPTPHHPIYKSPPPPTPHKKPYKYKSPPPPPPVYKSPPPPPPKKPYKYKSPPPPVYKSPPRPPPVTSHHHLHHHTKSPTSTSLLHPLLQSTSLLHHHHQRNPTSTNLHHHQCTSLLHLHLQYTSHHHLHHHTKS

SEQ ID NO: 1009 - protein, 107 aa, Davallia fejeensis
MAALQTLAGLSLLLLVIASSLLPCSQAYWPPTPPPYSSQPPSPSYHKPPPAPLPSTPPPVYTPSPPIYTLPPSPPVQPPPVVWAPPPHFYKPPAPYAKPPVPCPPPS

SEQ ID NO: 1010 - protein, 15 aa, Zea mays
  MOD_RES 2: note = hydroxyproline
  MOD_RES 4: note = hydroxyproline
  MOD_RES 9: note = hydroxyproline
  MOD_RES 11..14: note = hydroxyproline
TPTPVSHTPSPPPPY

SEQ ID NO: 1011 - protein, 11 aa, Zea mays
  MOD_RES 2: note = hydroxyproline
  MOD_RES 4: note = hydroxyproline
  MOD_RES 8..9: note = hydroxyproline
TPSPYPTPPTY

SEQ ID NO: 1012 - protein, 12 aa, Zea mays
  MOD_RES 2: note = hydroxyproline
  MOD_RES 4: note = hydroxyproline
  MOD_RES 7: note = hydroxyproline
  MOD_RES 9: note = hydroxyproline
TPSPKPPTPKPP

SEQ ID NO: 1013 - protein, 16 aa, Zea mays
  MOD_RES 2: note = hydroxyproline
  MOD_RES 4: note = hydroxyproline
  MOD_RES 7: note = hydroxyproline
  MOD_RES 13..14: note = hydroxyproline
TPSPKPPTPKPTPPTY

SEQ ID NO: 1014 - protein, 14 aa, Zea mays
  MOD_RES 2: note = hydroxyproline
  MOD_RES 4: note = hydroxyproline
  MOD_RES 7: note = hydroxyproline
TPTPKPPATKPPTY

SEQ ID NO: 1015 - protein, 12 aa, Zea mays
  MOD_RES 2: note = hydroxyproline
  MOD_RES 4: note = hydroxyproline
  MOD_RES 7: note = hydroxyproline
TPSPKPPTHPTP

SEQ ID NO: 1016 - protein, 16 aa, Zea mays
  MOD_RES 3..4: note = hydroxyproline
  MOD_RES 8: note = hydroxyproline
  MOD_RES 10: note = hydroxyproline
  MOD_RES 13: note = hydroxyproline
PTPPTYTPSPKPPTPK

SEQ ID NO: 1017 - protein, 157 aa, Microstegium vimineum
MMMGGKKAAALLLALVALSLAVEIQADDTTGYGYGGGGYTPTPEKPPNKGPKPEKPPKEHGHKHPKEHKPPTYTPTPKPTPPTYTPKPPTYPPPTYTPTPKPPATKPPTYPTPKPTPYTPTPKPPTYETPKPTPPRTTRSRSRRLPSLRHTRHPSRP

SEQ ID NO: 1018 - protein, 15 aa, Arabidopsis thaliana
  MOD_RES 2: note = hydroxyproline
  MOD_RES 4: note = hydroxyproline
  MOD_RES 6: note = hydroxyproline
  MOD_RES 12..13: note = hydroxyproline
APAPAPTTVTPPPTA

SEQ ID NO: 1019 - protein, 18 aa, Arabidopsis thaliana
  MOD_RES 2: note = hydroxyproline
  MOD_RES 4: note = hydroxyproline
  MOD_RES 6: note = hydroxyproline
  MOD_RES 10..12: note = hydroxyproline
  MOD_RES 15..17: note = hydroxyproline
APAPTPTATPPPATPPPV

SEQ ID NO: 1020 - protein, 20 aa, Arabidopsis thaliana
  MOD_RES 8: note = hydroxyproline
  MOD_RES 10: note = hydroxyproline
  MOD_RES 12: note = hydroxyproline
EILTKSSPAPSPDLADSPLI

SEQ ID NO: 1021 - protein, 11 aa, Daucus carota
  MOD_RES 4: note = hydroxyproline
  MOD_RES 6: note = hydroxyproline
  MOD_RES 8: note = hydroxyproline
  MOD_RES 10: note = hydroxyproline
DEAPAPAPSPM

SEQ ID NO: 1022 - protein, 7 aa, Daucus carota
  MOD_RES 1: note = hydroxyproline
  MOD_RES 3: note = hydroxyproline
  MOD_RES 5: note = hydroxyproline
  MOD_RES 7: note = hydroxyproline
PAPAPAP

SEQ ID NO: 1023 - protein, 154 aa, Phelline lucida
MARHLVVLALIFVALVGFVSAEGPSSSPAATPSASPATTPSAAPPKDAATPTAATPAASTPSSSAPTAATPDASAAPSTTTDSPASSPDTEEPSSPPAPASESTDSPLASPPAPTASSPTGDEAPAPAPKSSGAATLKVSAVAGAAVVAGVFLF

SEQ ID NO: 1024 - protein, 9 aa, Lycopersicum esculentum
  MOD_RES 1: note = hydroxyproline
  MOD_RES 5: note = hydroxyproline
PAAAPTKPK

SEQ ID NO: 1025 - protein, 24 aa, Lycopersicum esculentum
  MOD_RES 2: note = hydroxyproline
  MOD_RES 6..7: note = hydroxyproline
  MOD_RES 11..12: note = hydroxyproline
  MOD_RES 14: note = hydroxyproline
  MOD_RES 16: note = hydroxyproline
  MOD_RES 21..22: note = hydroxyproline
APASSPPVQSPPAPAPEVATPPAV

SEQ ID NO: 1026 - protein, 22 aa, Lycopersicum esculentum
  MOD_RES 5: note = hydroxyproline
  MOD_RES 9: note = hydroxyproline
  CARBOHYD 9: note = glycosylated
  MOD_RES 18..19: note = hydroxyproline
  MOD_RES 22: note = hydroxyproline
TGQTPAAAPVGAKAGTTPPAAP

SEQ ID NO: 1027 - protein, 25 aa, Lycopersicum esculentum
  MOD_RES 2: note = hydroxyproline
  MOD_RES 6..7: note = hydroxyproline
  MOD_RES 11..12: note = hydroxyproline
  MOD_RES 14: note = hydroxyproline
  MOD_RES 16: note = hydroxyproline
  MOD_RES 21..22: note = hydroxyproline
APASSPPVQSPPAPAPEVATPPVST

SEQ ID NO: 1028 - protein, 9 aa, Lycopersicum esculentum
  MOD_RES 1..2: note = hydroxyproline
  MOD_RES 6: note = hydroxyproline
  CARBOHYD 6: note = glycosylated
PPAAAPVAA

SEQ ID NO: 1029 - protein, 215 aa, Solanum lasiophyllum
MDRKFVFLVSILCIVVASVTGQTPAAAPVGAKAGTTPPAAAPTKPKTPAPATAPASAPPTAVPVAPVTAPVTAPTTPVVAAPVSAPASSPPVKAPASSPPVQSPPAPAPEVATPPAVSTPPAAAPVAAPVASETTPAPAPSKGKVKGKKGKKHNASPAPSPDMMSPPAPPSEAPGPSMDSDSAPSPSLNDESGAEKLKMLGSLVAGWAVMSWLLF

SEQ ID NO: 1030 - protein, 13 aa, Lycopersicum esculentum
  MOD_RES 6: note = hydroxyproline
  MOD_RES 8: note = hydroxyproline
  MOD_RES 12..13: note = hydroxyproline
SAYISPAPVASPP

SEQ ID NO: 1031 - protein, 14 aa, Nicotiana alata
  MOD_RES 4..5: note = hydroxyproline
  MOD_RES 7..8: note = hydroxyproline
  MOD_RES 13: note = hydroxyproline
LASPPAPPTADTPA

SEQ ID NO: 1032 - protein, 12 aa, Nicotiana alata
  MOD_RES 3: note = hydroxyproline
  MOD_RES 11: note = hydroxyproline
FAPSGGVALPPS

SEQ ID NO: 1033 - protein, 12 aa, Nicotiana alata
  MOD_RES 4: note = hydroxyproline
  MOD_RES 8: note = hydroxyproline
VSAPSQSPSTAA

SEQ ID NO: 1034 - protein, 14 aa, Nicotiana alata
  MOD_RES 5: note = hydroxyproline
  MOD_RES 9: note = hydroxyproline
IGSAPAGSPTSSPN

SEQ ID NO: 1035 - protein, 132 aa, Nicotiana sylvestris
MAYSRMMFAFIFALVAGSAFAQAPGASPAATPKASPVAPVASPPTAVVTPVSAPSQSPTTAASPSESPLASPPAPPTADTPAFAPSGGVALPPSIGAAPAGSPTSSPNAASLNRVAVAGSAVVAIFAASLMF

SEQ ID NO: 1036 - protein, 6 aa, Pyrus communis
  MOD_RES 3..4: note = hydroxyproline
  CARBOHYD 4: note = glycosylated
QAPPAA

SEQ ID NO: 1037 - protein, 17 aa, Pyrus communis
  MOD_RES 4: note = hydroxyproline
  MOD_RES 8..9: note = hydroxyproline
  MOD_RES 13..14: note = hydroxyproline
AKSPTATPPTATPPSAV

SEQ ID NO: 1038 - protein, 20 aa, Pyrus communis
  MOD_RES 4: note = hydroxyproline
  MOD_RES 6: note = hydroxyproline
  MOD_RES 10..11: note = hydroxyproline
  MOD_RES 15: note = hydroxyproline
  MOD_RES 19: note = hydroxyproline
  CARBOHYD 19: note = glycosylated
VTAPTPSASPPSSTPASTPA

SEQ ID NO: 1039 - protein, 141 aa, Cotoneaster transcaucasicus
MKMGFAGFQVLMVLSLLATSCIAQAPGAAPTASPPTATPPTATPPTATPPSAVPVPSPSKTPTVSPTPSPVTAPTPSASPPASTPASTPSAESPSSPPAPSGPSPNSPPADALPPSGTSAISRVVIAGTALAGVFFAVVLA

SEQ ID NO: 1040 - protein, 18 aa, Pyrus communis
  MOD_RES 3: note = hydroxyproline
  MOD_RES 7: note = hydroxyproline
  MOD_RES 10: note = hydroxyproline
  MOD_RES 12: note = hydroxyproline
  MOD_RES 16..17: note = hydroxyproline
LSPKKSPTAPSPSSTPPT

SEQ ID NO: 1041 - protein, 19 aa, Pyrus communis
  MOD_RES 3: note = hydroxyproline
  MOD_RES 7: note = hydroxyproline
  MOD_RES 10: note = hydroxyproline
  MOD_RES 12: note = hydroxyproline
  MOD_RES 16..17: note = hydroxyproline
LSPKKSPTAPSPSSTPPTT

SEQ ID NO: 1042 - protein, 15 aa, Pyrus communis
  VARIANT 1: note = V or S
  VARIANT 2: note = P or S
  MOD_RES 3..4: note = hydroxyproline
  CARBOHYD 3: note = glycosylated
  MOD_RES 8: note = hydroxyproline
  MOD_RES 11..13: note = hydroxyproline
XXPPVQSPASPPPTT

SEQ ID NO: 1043 - protein, 11 aa, Pyrus communis
  MOD_RES 1..4: note = hydroxyproline
  CARBOHYD 1..2: note = glycosylated
  MOD_RES 7: note = hydroxyproline
  MOD_RES 9: note = hydroxyproline
  CARBOHYD 9: note = glycosylated
  VARIANT 11: note = hydroxyproline or S
PPPPAAPVPAX

SEQ ID NO: 1044 - protein, 127 aa, Amelanchier canadensis
MAQFSGVVMVLMASLLLASTGAQSPASSPAKSPALSPKKSPTAPSPSSTPPTAATPSPSSTSPSTSPSTSPVADSPPSPLSSSPSPSPSSVSRSPSEAPAPANGAVLNRLSVSASVAAGIFAAVLVM

SEQ ID NO: 1045 - protein, 8 aa, Rosa sp.
  MOD_RES 3: note = hydroxyproline
  MOD_RES 5: note = hydroxyproline
  MOD_RES 7: note = hydroxyproline
DAPAPSPV

SEQ ID NO: 1046 - protein, 185 aa, Batis maritima
MARFDFLLVATVLLLINFALAQDSPVSAPSPVQVPDFEPADSSPALVPASQPETAFSPPSPPPAEAPEISSFSPAKSPEISSPPAPAPVPTAPAPPPSEPPVSPSEEPDAPAPSPVTDGEPSEISDLSADEGSKTEKGMSGGKKFGVAFGVLAGAGLVGLGVFVYRKRQENIKRARYSYAAREFL

SEQ ID NO: 1047 - protein, 19 aa, Arabidopsis thaliana
  MOD_RES 7..10: note = hydroxyproline
  MOD_RES 16..17: note = hydroxyproline
NYFYSSPPPPVKHYTPPVK

SEQ ID NO: 1048 - protein, 7 aa, Arabidopsis thaliana
  MOD_RES 2..5: note = hydroxyproline
SPPPPVK

SEQ ID NO: 1049 - protein, 8 aa, Arabidopsis thaliana
  MOD_RES 4..6: note = hydroxyproline
HYSPPPVY

SEQ ID NO: 1050 - protein, 116 aa, Brassica nigra
MGSPMASLAATLLILALSLGFVSETTANYYYSSPPPPVKHYTPPVYKSPPPPKKDYEYKSPPPPVKHYSPPPVYKSPPPPKKHYEYKSPPPPVYKSPPPPVYHSPPPPKKHYEYKS

SEQ ID NO: 1051 - protein, 6 aa, Beta vulgaris
  MOD_RES 2..3: note = hydroxyproline
SPPVHK

SEQ ID NO: 1052 - protein, 9 aa, Beta vulgaris
  MOD_RES 3..4: note = hydroxyproline
  MOD_RES 6: note = hydroxyproline
YPPPTPVYK

SEQ ID NO: 1053 - protein, 8 aa, Beta vulgaris
  MOD_RES 2..4: note = hydroxyproline
  MOD_RES 6: note = hydroxyproline
SPPPTPSP

SEQ ID NO: 1054 - protein, 15 aa, Beta vulgaris
  MOD_RES 2..3: note = hydroxyproline
  MOD_RES 9..10: note = hydroxyproline
  VARIANT 12: note = hydroxyproline or glycosylated hydroxyproline
SPPVHEYPPPTXVYK

SEQ ID NO: 1055 - protein, 108 aa, Beta maritima
MGKLGGMASLVATLLVAFVSLSLPAQTIADYTYSSPPPPVHHEMPPKGHYSPLPPTPVYKSPPVHTYPPPSPIYKSPPVHEYPPPTPVYKSPPVHKYPPPTPVYKSPP

SEQ ID NO: 1056 - protein, 11 aa, Lycopersicum esculentum
  MOD_RES 2..6: note = hydroxyproline
  MOD_RES 8: note = hydroxyproline
  CARBOHYD 8: note = glycosylated
SPPPPPTPVYK

SEQ ID NO: 1057 - protein, 10 aa, Lycopersicum esculentum
  MOD_RES 2..5: note = hydroxyproline
  MOD_RES 7: note = hydroxyproline
SPPPPTPVYK

SEQ ID NO: 1058 - protein, 16 aa, Lycopersicum esculentum
  MOD_RES 2..5: note = hydroxyproline
  MOD_RES 13: note = hydroxyproline
SPPPPVKPYHPTPVYK

SEQ ID NO: 1059 - protein, 102 aa, Papaver bracteatum
MANRGFSMASSITLLVVLISLSWPFFAEADGYYSYKSPPPPTPVYKYASPPPPVYIYKSPPPPTPVYKSPPPPTPVYKYKSPPPPTPVYKYKSPPPPTPVYK

SEQ ID NO: 1060 - protein, 8 aa, Lycopersicum esculentum
  MOD_RES 2..5: note = hydroxyproline
SPPPPVYK

SEQ ID NO: 1061 - protein, 155 aa, Solanum xanthocarpum
MAKIAYLLITLLVALVSLSFPSECKENYYYTSPPPPIPIYKYKSPPPPVYKYKSPPPPDYKYKSPPPPVYKYKSPPPPPPVYKYKSPPPPVYKYKSPPPPPPVYKYKSPPPPVYKYKSPPPPPPVYKYKSPPPPVYKYKSPPPPPPVYKYKSPPP

SEQ ID NO: 1062 - protein, 16 aa, Lycopersicum esculentum
  MOD_RES 2..5: note = hydroxyproline
  MOD_RES 7: note = hydroxyproline
  MOD_RES 9..12: note = hydroxyproline
SPPPPSPSPPPPYYYK

SEQ ID NO: 1063 - protein, 237 aa, Convolvulus arvensis
MAAHGGDPGRGRLLPQILVALVVLAAASVVSGDPYVYASPPPPTYEYKSPPPPSPSPPPPYEYKSPPPPSPSPPPPYEYKSPPPPSPSPPPPYYYKSPPPPSPSPPPPYYYKSPPPPSPSPPPPYYYKSPPPPSPSPPPPYYYHSPPPPKKSPPPPYYYTSPPPPVKSPPPLYYYQSPPPPKKSPPPPYYYHSPPPPVKSPPPPYYYNSPPPPKKSPPPPYYYHSPPPPYYYNSPPP

SEQ ID NO: 1064 - protein, 12 aa, Lycopersicum esculentum
  MOD_RES 6..11: note = hydroxyproline
NYQYSPPPPPPK

SEQ ID NO: 1065 - protein, 10 aa, Medicago truncutula
  VARIANT 1: note = K or A
  MOD_RES 3..6: note = hydroxyproline
  MOD_RES 8: note = hydroxyproline
XSPPPPAPVY

SEQ ID NO: 1066 - protein, 10 aa, Medicago truncutula
  VARIANT 2: note = K or A
  MOD_RES 3..6: note = hydroxyproline
  MOD_RES 8: note = hydroxyproline
KXPPPPTPVY

SEQ ID NO: 1067 - protein, 290 aa, Heliotropium karwinskyi
MASPLFAILVALVSLNLLPSQTTANYPYASPHPPPYHYKSMPPIPKYPPHHHPIYKSPRPLPPIHKPPPHHHPVYKSPPPPPSVHKYPPPSPSHKKPYKKSPPPPILVYHSPPPPQVYKSPPLPPPVYKSPPPKKPYKSPPPPTSVYHSPPPPPTKKPYKSPPPPPTPVYHSPPPPPTKKPYKSPPPPTPVYHSPPPPPTKKPYKYKSPPPPTPVYKSPPPVYRSPPPPHKKPYKYKSPPPPAPVYHSPPPTPHHKKPYKYKSPPPPPPIYKSPPPPSHHYYYSSPPHHY

SEQ ID NO: 1068 - protein, 7 aa, Medicago truncutula
  MOD_RES 3..5: note = hydroxyproline
KSPPPSS

SEQ ID NO: 1069 - protein, 208 aa, Solanum xanthocarpum
MGFTSVKAIVLIQVLALVLDSSSKLSFGEVTEDWSLDNYQDNEVISNFKSSPGRSTPSTPKSSPSPSLPLSSTPPPTKSSPSSLLLAKSPPPSSSPSPPPTKSPPSPSSSPPIYASSPLAKSPAPSPLSPSSSPSPPTKSPPPSLAKSPPPIAKSPPPTLAKSPSPSVKSPPSTSSSPLLPTKSPPPSLVKSSPPTTNYPLPPPVKSS

SEQ ID NO: 1070 - protein, 14 aa, Medicago truncutula
  VARIANT 2: note = A or S
  MOD_RES 3..6: note = hydroxyproline
  CARBOHYD 6: note = glycosylated
  VARIANT 7: note = A or S
  MOD_RES 8: note = hydroxyproline
  MOD_RES 10..13: note = hydroxyproline
  CARBOHYD 13: note = glycosylated
KXPPPPXPSPPPPY

SEQ ID NO: 1071 - protein, 15 aa, Medicago truncutula
  MOD_RES 3..6: note = hydroxyproline
  MOD_RES 8: note = hydroxyproline
  MOD_RES 10..13: note = hydroxyproline
  VARIANT 14: note = hydroxyproline or glycosylated hydroxyproline
KSPPPPSPSPPPPXY

SEQ ID NO: 1072 - protein, 8 aa, Medicago truncutula
  VARIANT 1: note = H or D
  MOD_RES 3..6: note = hydroxyproline
XSPPPPVH

SEQ ID NO: 1073 - protein, 167 aa, Physocarpus opulifolius
MGNSTALAFMEEKLFPCSLRLKVGLILLAIFAGLTSEEETGLLCISDCTTCPIICSPPPPQPESSNPPPSPDSPPPPVHHSPAPQYYYTSPPPSPPPPSPPKKSPSPPSSSSTYSSKGSPPAPWNYFYNLPPSGPDQVPPTTGVLQHNNSFPYYYFYASEASSLSVH

SEQ ID NO: 1074 - protein, 14 aa, Glycine max
  MOD_RES 1: note = hydroxyproline
  CARBOHYD 1: note = glycosylated
  MOD_RES 6: note = hydroxyproline
  MOD_RES 11: note = hydroxyproline
PYEKPPIYKPPVYT

SEQ ID NO: 1075 - protein, 99 aa, Glycine soja
MRNMASLSSSLVLLLAALILSPQVLADYEKPPIYKPPVYTPPVYKPPIYKPPVYTPPVYKPPVEKPPVYKPPVYKPPVEKPPVYKPPVYKPPIYKPPVV

SEQ ID NO: 1076 - protein, 18 aa, Glycine max
  MOD_RES 6: note = hydroxyproline
  MOD_RES 11: note = hydroxyproline
  MOD_RES 16: note = hydroxyproline
NYENPPVYKPPTEKPPVY

SEQ ID NO: 1077 - protein, 103 aa, Glycine soja
MASLSSLVLLLAALILSPQVLANYENPPVYKPPTEKPPVYKPPVEKPPVYKPPVENPPIYKPPVEKPPVYKPPVDTASYKPPIYKPPVYKPPVEKPPVYKPPV

SEQ ID NO: 1078 - protein, 10 aa, Glycine max
  MOD_RES 2: note = hydroxyproline
  MOD_RES 7: note = hydroxyproline
PPVYKPPVYK

SEQ ID NO: 1079 - protein, 10 aa, Glycine max
  MOD_RES 2: note = hydroxyproline
  MOD_RES 7: note = hydroxyproline
PPVYKPPVEK

SEQ ID NO: 1080 - protein, 10 aa, Medicago truncutula
  MOD_RES 3: note = hydroxyproline
  MOD_RES 8: note = hydroxyproline
KAPVGKPPVY

SEQ ID NO: 1081 - protein, 10 aa, Arabidopsis thaliana
  VARIANT 1: note = T, V or S
  VARIANT 2: note = E, D or L
  MOD_RES 4: note = hydroxyproline
  MOD_RES 6: note = hydroxyproline
  VARIANT 7: note = S or A
  MOD_RES 8: note = hydroxyproline
XXAPAPXPTS

SEQ ID NO: 1082 - protein, 12 aa, Arabidopsis thaliana
  VARIANT 1: note = T, V or S
  VARIANT 2: note = E, D or L
  MOD_RES 4: note = hydroxyproline
  MOD_RES 6: note = hydroxyproline
  VARIANT 7: note = S or A
  MOD_RES 8: note = hydroxyproline
XXAPAPXPTSGS

SEQ ID NO: 1083 - protein, 17 aa, Arabidopsis thaliana
  MOD_RES 9: note = hydroxyproline
  MOD_RES 11: note = hydroxyproline
  MOD_RES 13: note = hydroxyproline
  MOD_RES 15: note = hydroxyproline
HEGHHHHAPAPAPGPAS

SEQ ID NO: 1084 - protein, 21 aa, Arabidopsis thaliana
  MOD_RES 2: note = hydroxyproline
  MOD_RES 6..7: note = hydroxyproline
  VARIANT 10..11: note = P or hydroxyproline
  VARIANT 14..15: note = P or hydroxyproline
  VARIANT 18..19: note = P or hydroxyproline
APVSSPPAKXXVKXXVYXXTK

SEQ ID NO: 1085 - protein, 20 aa, Arabidopsis thaliana
  MOD_RES 2: note = hydroxyproline
  VARIANT 5..6: note = P or hydroxyproline
  VARIANT 9..10: note = P or hydroxyproline
  VARIANT 13..14: note = P or hydroxyproline
  VARIANT 17..18: note = P or hydroxyproline
APVKXXTKXXVKXXVYXXTK

SEQ ID NO: 1086 - protein, 23 aa, Arabidopsis thaliana
  MOD_RES 2: note = hydroxyproline
  VARIANT 5..6: note = P or hydroxyproline
  MOD_RES 9..10: note = hydroxyproline
  VARIANT 13..14: note = P or hydroxyproline
  VARIANT 17..18: note = P or hydroxyproline
APVKXXVSPPTKXXVTXXVYPPK

SEQ ID NO: 1087 - protein, 40 aa, Arabidopsis thaliana
  MOD_RES 2: note = hydroxyproline
  VARIANT 5..6: note = P or hydroxyproline
  VARIANT 9..10: note = P or hydroxyproline
  VARIANT 13..14: note = P or hydroxyproline
  MOD_RES 17..18: note = hydroxyproline
  VARIANT 21..22: note = P or hydroxyproline
  MOD_RES 25..26: note = hydroxyproline
  VARIANT 29..30: note = P or hydroxyproline
  VARIANT 33..34: note = P or hydroxyproline
  VARIANT 37..38: note = P or hydroxyproline
APVKXXTKXXVKXXVSPPAKXXVSPPAKXXVKXXVYXXTK

SEQ ID NO: 1088 - protein, 11 aa, Nicotiana alata
  MOD_RES 8: note = hydroxyproline
KHHDHLSPAQA

SEQ ID NO: 1089 - protein, 9 aa, Nicotiana alata
  MOD_RES 4: note = hydroxyproline
  MOD_RES 8: note = hydroxyproline
HLSPAQAPK

SEQ ID NO: 1090 - protein, 113 aa, Solanum ptycanthum
MAKALVLFQLSVLLLSSFTVVSHAHDHLSPAQAPKPHKGGHHHHHSPAPSPISYTPTKPPTKAPTKPPTKAPAYSPSKPPAKPPVKPPTPSPSPSPSPYYPTRKPVVVRGLVY

SEQ ID NO: 1091 - protein, 15 aa, Nicotiana alata
  VARIANT 10: note = A or hydroxyproline
  MOD_RES 12: note = hydroxyproline
  CARBOHYD 12: note = glycosylated
  MOD_RES 14: note = hydroxyproline
  CARBOHYD 14: note = glycosylated
  VARIANT 15: note = A or hydroxyproline
AKSKFMIIPXSPTPX

SEQ ID NO: 1092 - protein, 21 aa, Nicotiana alata
  MOD_RES 7: note = hydroxyproline
  MOD_RES 11: note = hydroxyproline
  MOD_RES 14: note = hydroxyproline
  MOD_RES 16: note = hydroxyproline
LFFGKSPKKSPSSPTPVNKPS

SEQ ID NO: 1093 - protein, 7 aa, Nicotiana alata
  VARIANT 1: note = A or P
  MOD_RES 2: note = hydroxyproline
  CARBOHYD 2: note = glycosylated
  MOD_RES 7: note = hydroxyproline
XPVVEPP

SEQ ID NO: 1094 - protein, 10 aa, Nicotiana alata
  MOD_RES 3..5: note = hydroxyproline
  CARBOHYD 5: note = glycosylated
KPPPPAYTQP

SEQ ID NO: 1095 - protein, 10 aa, Nicotiana alata
  MOD_RES 3..5: note = hydroxyproline
  CARBOHYD 5: note = glycosylated
SSPPPQDAYD

SEQ ID NO: 1096 - protein, 6 aa, Nicotiana alata
VNPGPG

SEQ ID NO: 1097 - protein, 10 aa, Nicotiana alata
  MOD_RES 3..4: note = hydroxyproline
LPPPSIHPAG

SEQ ID NO: 1098 - protein, 107 aa, Cephalotus follicularis
MGSKNCTAIFFMFMIFMLISLPPIYACGTCTQPHPPPKHRPGKPGHPKTPHPEPPTPKYPPFHGGPPKVSPPSKNPPSPPVVEPPIIISPPPVINPPVINPPVIVPP

SEQ ID NO: 1099 - protein, 89 aa, Parthenium hysterophorus
  MOD_RES 58..60: note = hydroxyproline
  MOD_RES 63: note = hydroxyproline
  MOD_RES 66: note = hydroxyproline
  MOD_RES 69: note = hydroxyproline
  MOD_RES 71..72: note = hydroxyproline
  MOD_RES 80..81: note = hydroxyproline
  MOD_RES 83..84: note = hydroxyproline
  CARBOHYD 83..84: note = glycosylated
  MOD_RES 88: note = hydroxyproline
KVCEKPSKTWFGNCKDTEKCDKRCMEWEGAKHGACHQRESKYMCFCYFDCDPKKNPGPPPGAPGTPGTPAPPGEGEGCAPPGPPAEGPA

SEQ ID NO: 1100 - protein, 22 aa, Pyrus commnis
  MOD_RES 6: note = hydroxyproline
  MOD_RES 8: note = hydroxyproline
  MOD_RES 17: note = hydroxyproline
  MOD_RES 21: note = hydroxyproline
AEAEAPTPALQVVAEAPELVPT

SEQ ID NO: 1101 - protein, 7 aa, Pyrus commnis
  MOD_RES 1: note = hydroxyproline
  MOD_RES 3: note = hydroxyproline
  MOD_RES 5: note = hydroxyproline
PVPTPSY

SEQ ID NO: 1102 - protein, 19 aa, Pyrus commnis
  MOD_RES 6: note = hydroxyproline
  MOD_RES 8: note = hydroxyproline
  MOD_RES 17: note = hydroxyproline
AEAEAPTPALQVVAEAPEL

SEQ ID NO: 1103 - protein, 17 aa, Pyrus commnis
  MOD_RES 6: note = hydroxyproline
  MOD_RES 10: note = hydroxyproline
  MOD_RES 12: note = hydroxyproline
  MOD_RES 14: note = hydroxyproline
  MOD_RES 16: note = hydroxyproline
VVAEAPELVPTPVPTPS

SEQ ID NO: 1104 - protein, 11 aa, Pyrus commnis
  MOD_RES 3: note = hydroxyproline
  MOD_RES 5: note = hydroxyproline
  MOD_RES 7: note = hydroxyproline
  MOD_RES 9: note = hydroxyproline
LVPTPVPTPSY

SEQ ID NO: 1105 - protein, 22 aa, Senegalia senegal
  MOD_RES 2..5: note = hydroxyproline
  MOD_RES 10: note = hydroxyproline
  MOD_RES 12: note = hydroxyproline
  MOD_RES 14: note = hydroxyproline
  MOD_RES 16..18: note = hydroxyproline
SPPPPTSLSPSPTPTPPPLGPH

SEQ ID NO: 1106 - protein, 19 aa, Solanum nigrum
  MOD_RES 8: note = hydroxyproline
  MOD_RES 10..11: note = hydroxyproline
  MOD_RES 15: note = hydroxyproline
RNRPYITPSPPEASPSTKQ

SEQ ID NO: 1107 - protein, 20 aa, Solanum nigrum
  MOD_RES 9..10: note = hydroxyproline
  MOD_RES 12: note = hydroxyproline
GRHDHVLPPPSPKHEPIIGQ

SEQ ID NO: 1108 - protein, 20 aa, Solanum nigrum
  MOD_RES 7: note = hydroxyproline
  MOD_RES 9..10: note = hydroxyproline
  MOD_RES 12: note = hydroxyproline
GRHDHVPAPPAPKPEDEQGQ

SEQ ID NO: 1109 - protein, 13 aa, Solanum tuberosum
  MOD_RES 6..13: note = hydroxyproline
  CARBOHYD 11: note = glycosylated
CKLPSPPPPPPPP

SEQ ID NO: 1110 - protein, 18 aa, Solanum tuberosum
  MOD_RES 4..11: note = hydroxyproline
  CARBOHYD 10..11: note = glycosylated
  MOD_RES 13..18: note = hydroxyproline
  CARBOHYD 16..17: note = glycosylated
LPSPPPPPPPPSPPPPPP

SEQ ID NO: 1111 - protein, 18 aa, Solanum tuberosum
  MOD_RES 4..9: note = hydroxyproline
  VARIANT 10: note = H or glycosylated hydroxyproline
  MOD_RES 11: note = hydroxyproline
  MOD_RES 13..16: note = hydroxyproline
  MOD_RES 18: note = hydroxyproline
LPSPPPPPPXPSPPPPSP

SEQ ID NO: 1112 - protein, 11 aa, Solanum tuberosum
  MOD_RES 1: note = hydroxyproline
  MOD_RES 3..6: note = hydroxyproline
  MOD_RES 8..11: note = hydroxyproline
  CARBOHYD 10: note = glycosylated
PSPPPPSPPPP

SEQ ID NO: 1113 - protein, 158 aa, Oenothera gaura
MDSSISFFLIIVLQLLSGLAPIIADKSYISYCALRQKGPCYPPPPPSPPPPPPPSPPSPPHLSPSPSPSPPSPPYLSPSPSPPPSPPPHPSQPPPPPPSPPSPPSPSPPPSLLPSPPPPPPPSPPSPPSPPPSPTALPPTNITQGNGNTGIYLHLLKQ

SEQ ID NO: 1114 - protein, 22 aa, Solanum tuberosum
  MOD_RES 1: note = hydroxyproline
  CARBOHYD 1: note = glycosylated
  MOD_RES 5: note = hydroxyproline
  MOD_RES 15: note = hydroxyproline
  CARBOHYD 15: note = glycosylated
PASTPSPPPLPYPQPGLKKPGG

SEQ ID NO: 1115 - protein, 13 aa, Solanum tuberosum
  MOD_RES 5: note = hydroxyproline
DASTPSPPPLPDP

SEQ ID NO: 1116 - protein, 22 aa, Solanum tuberosum
  MOD_RES 21: note = hydroxyproline
  CARBOHYD 21: note = glycosylated
MPYPEGRSGYQVYSKAQLETPL

SEQ ID NO: 1117 - protein, 20 aa, Solanum tuberosum
  MOD_RES 1: note = hydroxyproline
  CARBOHYD 1: note = glycosylated
  MOD_RES 4..5: note = hydroxyproline
  CARBOHYD 4: note = glycosylated
  MOD_RES 8..10: note = hydroxyproline
  MOD_RES 12..15: note = hydroxyproline
  CARBOHYD 13: note = glycosylated
  MOD_RES 17..18: note = hydroxyproline
  MOD_RES 20: note = hydroxyproline
PQPPPSPPPPSPPPPLPPLP

SEQ ID NO: 1118 - protein, 13 aa, Zinnia elegans
  MOD_RES 7: note = hydroxyproline
  MOD_RES 9: note = hydroxyproline
AHQTGAPAPAADC
